United States Patent Application Publication US 2026/0275334 A1 - sequence listing, part 2

SEQ ID NO: 23065 - DNA, 17 bp, synthetic construct
  misc_feature 1..17: note = Oligonucleotide
  source 1..17: mol_type = other DNA
ccactcacatagatgct

SEQ ID NO: 23066 - DNA, 17 bp, synthetic construct
  misc_feature 1..17: note = Oligonucleotide
  source 1..17: mol_type = other DNA
aggccactcacatagat

SEQ ID NO: 23067 - DNA, 17 bp, synthetic construct
  misc_feature 1..17: note = Oligonucleotide
  source 1..17: mol_type = other DNA
acaaggccactcacata

SEQ ID NO: 23068 - DNA, 17 bp, synthetic construct
  misc_feature 1..17: note = Oligonucleotide
  source 1..17: mol_type = other DNA
aggacaaggccactcac

SEQ ID NO: 23069 - DNA, 17 bp, synthetic construct
  misc_feature 1..17: note = Oligonucleotide
  source 1..17: mol_type = other DNA
tccaggacaaggccact

SEQ ID NO: 23070 - DNA, 17 bp, synthetic construct
  misc_feature 1..17: note = Oligonucleotide
  source 1..17: mol_type = other DNA
ttttccaggacaaggcc

SEQ ID NO: 23071 - DNA, 17 bp, synthetic construct
  misc_feature 1..17: note = Oligonucleotide
  source 1..17: mol_type = other DNA
accttttccaggacaag

SEQ ID NO: 23072 - DNA, 17 bp, synthetic construct
  misc_feature 1..17: note = Oligonucleotide
  source 1..17: mol_type = other DNA
gaaaccttttccaggac

SEQ ID NO: 23073 - DNA, 17 bp, synthetic construct
  misc_feature 1..17: note = Oligonucleotide
  source 1..17: mol_type = other DNA
acagaaaccttttccag

SEQ ID NO: 23074 - DNA, 17 bp, synthetic construct
  misc_feature 1..17: note = Oligonucleotide
  source 1..17: mol_type = other DNA
ggcacagaaaccttttc

SEQ ID NO: 23075 - DNA, 17 bp, synthetic construct
  misc_feature 1..17: note = Oligonucleotide
  source 1..17: mol_type = other DNA
tttggcacagaaacctt

SEQ ID NO: 23076 - DNA, 17 bp, synthetic construct
  misc_feature 1..17: note = Oligonucleotide
  source 1..17: mol_type = other DNA
gtgtttggcacagaaac

SEQ ID NO: 23077 - DNA, 17 bp, synthetic construct
  misc_feature 1..17: note = Oligonucleotide
  source 1..17: mol_type = other DNA
agtgtgtttggcacaga

SEQ ID NO: 23078 - DNA, 17 bp, synthetic construct
  misc_feature 1..17: note = Oligonucleotide
  source 1..17: mol_type = other DNA
gcaagtgtgtttggcac

SEQ ID NO: 23079 - DNA, 17 bp, synthetic construct
  misc_feature 1..17: note = Oligonucleotide
  source 1..17: mol_type = other DNA
agggcaagtgtgtttgg

SEQ ID NO: 23080 - DNA, 17 bp, synthetic construct
  misc_feature 1..17: note = Oligonucleotide
  source 1..17: mol_type = other DNA
ggcagggcaagtgtgtt

SEQ ID NO: 23081 - DNA, 17 bp, synthetic construct
  misc_feature 1..17: note = Oligonucleotide
  source 1..17: mol_type = other DNA
aaaggcagggcaagtgt

SEQ ID NO: 23082 - DNA, 17 bp, synthetic construct
  misc_feature 1..17: note = Oligonucleotide
  source 1..17: mol_type = other DNA
ttaaaaggcagggcaag

SEQ ID NO: 23083 - DNA, 17 bp, synthetic construct
  misc_feature 1..17: note = Oligonucleotide
  source 1..17: mol_type = other DNA
gtcttaaaaggcagggc

SEQ ID NO: 23084 - DNA, 17 bp, synthetic construct
  misc_feature 1..17: note = Oligonucleotide
  source 1..17: mol_type = other DNA
tcggtcttaaaaggcag

SEQ ID NO: 23085 - DNA, 17 bp, synthetic construct
  misc_feature 1..17: note = Oligonucleotide
  source 1..17: mol_type = other DNA
aagtcggtcttaaaagg

SEQ ID NO: 23086 - DNA, 17 bp, synthetic construct
  misc_feature 1..17: note = Oligonucleotide
  source 1..17: mol_type = other DNA
tcaaagtcggtcttaaa

SEQ ID NO: 23087 - DNA, 17 bp, synthetic construct
  misc_feature 1..17: note = Oligonucleotide
  source 1..17: mol_type = other DNA
tgttcaaagtcggtctt

SEQ ID NO: 23088 - DNA, 17 bp, synthetic construct
  misc_feature 1..17: note = Oligonucleotide
  source 1..17: mol_type = other DNA
ttctgttcaaagtcggt

SEQ ID NO: 23089 - DNA, 17 bp, synthetic construct
  misc_feature 1..17: note = Oligonucleotide
  source 1..17: mol_type = other DNA
gtgttctgttcaaagtc

SEQ ID NO: 23090 - DNA, 17 bp, synthetic construct
  misc_feature 1..17: note = Oligonucleotide
  source 1..17: mol_type = other DNA
tctgtgttctgttcaaa

SEQ ID NO: 23091 - DNA, 17 bp, synthetic construct
  misc_feature 1..17: note = Oligonucleotide
  source 1..17: mol_type = other DNA
acctctgtgttctgttc

SEQ ID NO: 23092 - DNA, 17 bp, synthetic construct
  misc_feature 1..17: note = Oligonucleotide
  source 1..17: mol_type = other DNA
gtcacctctgtgttctg

SEQ ID NO: 23093 - DNA, 17 bp, synthetic construct
  misc_feature 1..17: note = Oligonucleotide
  source 1..17: mol_type = other DNA
gtggtcacctctgtgtt

SEQ ID NO: 23094 - DNA, 17 bp, synthetic construct
  misc_feature 1..17: note = Oligonucleotide
  source 1..17: mol_type = other DNA
aaggtggtcacctctgt

SEQ ID NO: 23095 - DNA, 17 bp, synthetic construct
  misc_feature 1..17: note = Oligonucleotide
  source 1..17: mol_type = other DNA
attaaggtggtcacctc

SEQ ID NO: 23096 - DNA, 17 bp, synthetic construct
  misc_feature 1..17: note = Oligonucleotide
  source 1..17: mol_type = other DNA
aaaattaaggtggtcac

SEQ ID NO: 23097 - DNA, 17 bp, synthetic construct
  misc_feature 1..17: note = Oligonucleotide
  source 1..17: mol_type = other DNA
ctgaaaattaaggtggt

SEQ ID NO: 23098 - DNA, 17 bp, synthetic construct
  misc_feature 1..17: note = Oligonucleotide
  source 1..17: mol_type = other DNA
tcgctgaaaattaaggt

SEQ ID NO: 23099 - DNA, 17 bp, synthetic construct
  misc_feature 1..17: note = Oligonucleotide
  source 1..17: mol_type = other DNA
gtgtcgctgaaaattaa

SEQ ID NO: 23100 - DNA, 17 bp, synthetic construct
  misc_feature 1..17: note = Oligonucleotide
  source 1..17: mol_type = other DNA
caggtgtcgctgaaaat

SEQ ID NO: 23101 - DNA, 17 bp, synthetic construct
  misc_feature 1..17: note = Oligonucleotide
  source 1..17: mol_type = other DNA
gttcaggtgtcgctgaa

SEQ ID NO: 23102 - DNA, 17 bp, synthetic construct
  misc_feature 1..17: note = Oligonucleotide
  source 1..17: mol_type = other DNA
caagttcaggtgtcgct

SEQ ID NO: 23103 - DNA, 17 bp, synthetic construct
  misc_feature 1..17: note = Oligonucleotide
  source 1..17: mol_type = other DNA
aaacaagttcaggtgtc

SEQ ID NO: 23104 - DNA, 17 bp, synthetic construct
  misc_feature 1..17: note = Oligonucleotide
  source 1..17: mol_type = other DNA
agaaaacaagttcaggt

SEQ ID NO: 23105 - DNA, 17 bp, synthetic construct
  misc_feature 1..17: note = Oligonucleotide
  source 1..17: mol_type = other DNA
catagaaaacaagttca

SEQ ID NO: 23106 - DNA, 17 bp, synthetic construct
  misc_feature 1..17: note = Oligonucleotide
  source 1..17: mol_type = other DNA
ccccatagaaaacaagt

SEQ ID NO: 23107 - DNA, 17 bp, synthetic construct
  misc_feature 1..17: note = Oligonucleotide
  source 1..17: mol_type = other DNA
aaaccccatagaaaaca

SEQ ID NO: 23108 - DNA, 17 bp, synthetic construct
  misc_feature 1..17: note = Oligonucleotide
  source 1..17: mol_type = other DNA
gcaaaaccccatagaaa

SEQ ID NO: 23109 - DNA, 17 bp, synthetic construct
  misc_feature 1..17: note = Oligonucleotide
  source 1..17: mol_type = other DNA
aaggcaaaaccccatag

SEQ ID NO: 23110 - DNA, 17 bp, synthetic construct
  misc_feature 1..17: note = Oligonucleotide
  source 1..17: mol_type = other DNA
aaaaaggcaaaacccca

SEQ ID NO: 23111 - DNA, 17 bp, synthetic construct
  misc_feature 1..17: note = Oligonucleotide
  source 1..17: mol_type = other DNA
agaaaaaaggcaaaacc

SEQ ID NO: 23112 - DNA, 17 bp, synthetic construct
  misc_feature 1..17: note = Oligonucleotide
  source 1..17: mol_type = other DNA
ttcagaaaaaaggcaaa

SEQ ID NO: 23113 - DNA, 17 bp, synthetic construct
  misc_feature 1..17: note = Oligonucleotide
  source 1..17: mol_type = other DNA
ttgttcagaaaaaaggc

SEQ ID NO: 23114 - DNA, 17 bp, synthetic construct
  misc_feature 1..17: note = Oligonucleotide
  source 1..17: mol_type = other DNA
cgtttgttcagaaaaaa

SEQ ID NO: 23115 - DNA, 17 bp, synthetic construct
  misc_feature 1..17: note = Oligonucleotide
  source 1..17: mol_type = other DNA
aaacgtttgttcagaaa

SEQ ID NO: 23116 - DNA, 17 bp, synthetic construct
  misc_feature 1..17: note = Oligonucleotide
  source 1..17: mol_type = other DNA
gtcaaacgtttgttcag

SEQ ID NO: 23117 - DNA, 17 bp, synthetic construct
  misc_feature 1..17: note = Oligonucleotide
  source 1..17: mol_type = other DNA
tcagtcaaacgtttgtt

SEQ ID NO: 23118 - DNA, 17 bp, synthetic construct
  misc_feature 1..17: note = Oligonucleotide
  source 1..17: mol_type = other DNA
ggctcagtcaaacgttt

SEQ ID NO: 23119 - DNA, 17 bp, synthetic construct
  misc_feature 1..17: note = Oligonucleotide
  source 1..17: mol_type = other DNA
cttggctcagtcaaacg

SEQ ID NO: 23120 - DNA, 17 bp, synthetic construct
  misc_feature 1..17: note = Oligonucleotide
  source 1..17: mol_type = other DNA
atgcttggctcagtcaa

SEQ ID NO: 23121 - DNA, 17 bp, synthetic construct
  misc_feature 1..17: note = Oligonucleotide
  source 1..17: mol_type = other DNA
atcatgcttggctcagt

SEQ ID NO: 23122 - DNA, 17 bp, synthetic construct
  misc_feature 1..17: note = Oligonucleotide
  source 1..17: mol_type = other DNA
tccatcatgcttggctc

SEQ ID NO: 23123 - DNA, 17 bp, synthetic construct
  misc_feature 1..17: note = Oligonucleotide
  source 1..17: mol_type = other DNA
aactccatcatgcttgg

SEQ ID NO: 23124 - DNA, 17 bp, synthetic construct
  misc_feature 1..17: note = Oligonucleotide
  source 1..17: mol_type = other DNA
cacaactccatcatgct

SEQ ID NO: 23125 - DNA, 17 bp, synthetic construct
  misc_feature 1..17: note = Oligonucleotide
  source 1..17: mol_type = other DNA
atgcacaactccatcat

SEQ ID NO: 23126 - DNA, 17 bp, synthetic construct
  misc_feature 1..17: note = Oligonucleotide
  source 1..17: mol_type = other DNA
gatatgcacaactccat

SEQ ID NO: 23127 - DNA, 17 bp, synthetic construct
  misc_feature 1..17: note = Oligonucleotide
  source 1..17: mol_type = other DNA
acagatatgcacaactc

SEQ ID NO: 23128 - DNA, 17 bp, synthetic construct
  misc_feature 1..17: note = Oligonucleotide
  source 1..17: mol_type = other DNA
cacacagatatgcacaa

SEQ ID NO: 23129 - DNA, 17 bp, synthetic construct
  misc_feature 1..17: note = Oligonucleotide
  source 1..17: mol_type = other DNA
acacacacagatatgca

SEQ ID NO: 23130 - DNA, 17 bp, synthetic construct
  misc_feature 1..17: note = Oligonucleotide
  source 1..17: mol_type = other DNA
cacacacacacagatat

SEQ ID NO: 23131 - DNA, 17 bp, synthetic construct
  misc_feature 1..17: note = Oligonucleotide
  source 1..17: mol_type = other DNA
acgcacacacacacaga

SEQ ID NO: 23132 - DNA, 17 bp, synthetic construct
  misc_feature 1..17: note = Oligonucleotide
  source 1..17: mol_type = other DNA
gacacgcacacacacac

SEQ ID NO: 23133 - DNA, 17 bp, synthetic construct
  misc_feature 1..17: note = Oligonucleotide
  source 1..17: mol_type = other DNA
acagacacgcacacaca

SEQ ID NO: 23134 - DNA, 17 bp, synthetic construct
  misc_feature 1..17: note = Oligonucleotide
  source 1..17: mol_type = other DNA
cgcacagacacgcacac

SEQ ID NO: 23135 - DNA, 17 bp, synthetic construct
  misc_feature 1..17: note = Oligonucleotide
  source 1..17: mol_type = other DNA
caacgcacagacacgca

SEQ ID NO: 23136 - DNA, 17 bp, synthetic construct
  misc_feature 1..17: note = Oligonucleotide
  source 1..17: mol_type = other DNA
caccaacgcacagacac

SEQ ID NO: 23137 - DNA, 17 bp, synthetic construct
  misc_feature 1..17: note = Oligonucleotide
  source 1..17: mol_type = other DNA
gctcaccaacgcacaga

SEQ ID NO: 23138 - DNA, 17 bp, synthetic construct
  misc_feature 1..17: note = Oligonucleotide
  source 1..17: mol_type = other DNA
tccgctcaccaacgcac

SEQ ID NO: 23139 - DNA, 17 bp, synthetic construct
  misc_feature 1..17: note = Oligonucleotide
  source 1..17: mol_type = other DNA
gtgtccgctcaccaacg

SEQ ID NO: 23140 - DNA, 17 bp, synthetic construct
  misc_feature 1..17: note = Oligonucleotide
  source 1..17: mol_type = other DNA
cgcgtgtccgctcacca

SEQ ID NO: 23141 - DNA, 17 bp, synthetic construct
  misc_feature 1..17: note = Oligonucleotide
  source 1..17: mol_type = other DNA
cagcgcgtgtccgctca

SEQ ID NO: 23142 - DNA, 17 bp, synthetic construct
  misc_feature 1..17: note = Oligonucleotide
  source 1..17: mol_type = other DNA
agacagcgcgtgtccgc

SEQ ID NO: 23143 - DNA, 17 bp, synthetic construct
  misc_feature 1..17: note = Oligonucleotide
  source 1..17: mol_type = other DNA
tgcagacagcgcgtgtc

SEQ ID NO: 23144 - DNA, 17 bp, synthetic construct
  misc_feature 1..17: note = Oligonucleotide
  source 1..17: mol_type = other DNA
aggtgcagacagcgcgt

SEQ ID NO: 23145 - DNA, 17 bp, synthetic construct
  misc_feature 1..17: note = Oligonucleotide
  source 1..17: mol_type = other DNA
cgcaggtgcagacagcg

SEQ ID NO: 23146 - DNA, 17 bp, synthetic construct
  misc_feature 1..17: note = Oligonucleotide
  source 1..17: mol_type = other DNA
gcacgcaggtgcagaca

SEQ ID NO: 23147 - DNA, 17 bp, synthetic construct
  misc_feature 1..17: note = Oligonucleotide
  source 1..17: mol_type = other DNA
catgcacgcaggtgcag

SEQ ID NO: 23148 - DNA, 17 bp, synthetic construct
  misc_feature 1..17: note = Oligonucleotide
  source 1..17: mol_type = other DNA
ccgcatgcacgcaggtg

SEQ ID NO: 23149 - DNA, 17 bp, synthetic construct
  misc_feature 1..17: note = Oligonucleotide
  source 1..17: mol_type = other DNA
gtgccgcatgcacgcag

SEQ ID NO: 23150 - DNA, 17 bp, synthetic construct
  misc_feature 1..17: note = Oligonucleotide
  source 1..17: mol_type = other DNA
tgtgtgccgcatgcacg

SEQ ID NO: 23151 - DNA, 17 bp, synthetic construct
  misc_feature 1..17: note = Oligonucleotide
  source 1..17: mol_type = other DNA
acatgtgtgccgcatgc

SEQ ID NO: 23152 - DNA, 17 bp, synthetic construct
  misc_feature 1..17: note = Oligonucleotide
  source 1..17: mol_type = other DNA
cagacatgtgtgccgca

SEQ ID NO: 23153 - DNA, 17 bp, synthetic construct
  misc_feature 1..17: note = Oligonucleotide
  source 1..17: mol_type = other DNA
gcacagacatgtgtgcc

SEQ ID NO: 23154 - DNA, 17 bp, synthetic construct
  misc_feature 1..17: note = Oligonucleotide
  source 1..17: mol_type = other DNA
cacgcacagacatgtgt

SEQ ID NO: 23155 - DNA, 17 bp, synthetic construct
  misc_feature 1..17: note = Oligonucleotide
  source 1..17: mol_type = other DNA
acccacgcacagacatg

SEQ ID NO: 23156 - DNA, 17 bp, synthetic construct
  misc_feature 1..17: note = Oligonucleotide
  source 1..17: mol_type = other DNA
ctcacccacgcacagac

SEQ ID NO: 23157 - DNA, 17 bp, synthetic construct
  misc_feature 1..17: note = Oligonucleotide
  source 1..17: mol_type = other DNA
ccactcacccacgcaca

SEQ ID NO: 23158 - DNA, 17 bp, synthetic construct
  misc_feature 1..17: note = Oligonucleotide
  source 1..17: mol_type = other DNA
tgtccactcacccacgc

SEQ ID NO: 23159 - DNA, 17 bp, synthetic construct
  misc_feature 1..17: note = Oligonucleotide
  source 1..17: mol_type = other DNA
acgtgtccactcaccca

SEQ ID NO: 23160 - DNA, 17 bp, synthetic construct
  misc_feature 1..17: note = Oligonucleotide
  source 1..17: mol_type = other DNA
agcacgtgtccactcac

SEQ ID NO: 23161 - DNA, 17 bp, synthetic construct
  misc_feature 1..17: note = Oligonucleotide
  source 1..17: mol_type = other DNA
cacagcacgtgtccact

SEQ ID NO: 23162 - DNA, 17 bp, synthetic construct
  misc_feature 1..17: note = Oligonucleotide
  source 1..17: mol_type = other DNA
gcacacagcacgtgtcc

SEQ ID NO: 23163 - DNA, 17 bp, synthetic construct
  misc_feature 1..17: note = Oligonucleotide
  source 1..17: mol_type = other DNA
ggtgcacacagcacgtg

SEQ ID NO: 23164 - DNA, 17 bp, synthetic construct
  misc_feature 1..17: note = Oligonucleotide
  source 1..17: mol_type = other DNA
gcaggtgcacacagcac

SEQ ID NO: 23165 - DNA, 17 bp, synthetic construct
  misc_feature 1..17: note = Oligonucleotide
  source 1..17: mol_type = other DNA
catgcaggtgcacacag

SEQ ID NO: 23166 - DNA, 17 bp, synthetic construct
  misc_feature 1..17: note = Oligonucleotide
  source 1..17: mol_type = other DNA
acgcatgcaggtgcaca

SEQ ID NO: 23167 - DNA, 17 bp, synthetic construct
  misc_feature 1..17: note = Oligonucleotide
  source 1..17: mol_type = other DNA
cacacgcatgcaggtgc

SEQ ID NO: 23168 - DNA, 17 bp, synthetic construct
  misc_feature 1..17: note = Oligonucleotide
  source 1..17: mol_type = other DNA
tgccacacgcatgcagg

SEQ ID NO: 23169 - DNA, 17 bp, synthetic construct
  misc_feature 1..17: note = Oligonucleotide
  source 1..17: mol_type = other DNA
gtgtgccacacgcatgc

SEQ ID NO: 23170 - DNA, 17 bp, synthetic construct
  misc_feature 1..17: note = Oligonucleotide
  source 1..17: mol_type = other DNA
cacgtgtgccacacgca

SEQ ID NO: 23171 - DNA, 17 bp, synthetic construct
  misc_feature 1..17: note = Oligonucleotide
  source 1..17: mol_type = other DNA
acacacgtgtgccacac

SEQ ID NO: 23172 - DNA, 17 bp, synthetic construct
  misc_feature 1..17: note = Oligonucleotide
  source 1..17: mol_type = other DNA
tgcacacacgtgtgcca

SEQ ID NO: 23173 - DNA, 17 bp, synthetic construct
  misc_feature 1..17: note = Oligonucleotide
  source 1..17: mol_type = other DNA
ccatgcacacacgtgtg

SEQ ID NO: 23174 - DNA, 17 bp, synthetic construct
  misc_feature 1..17: note = Oligonucleotide
  source 1..17: mol_type = other DNA
cacccatgcacacacgt

SEQ ID NO: 23175 - DNA, 17 bp, synthetic construct
  misc_feature 1..17: note = Oligonucleotide
  source 1..17: mol_type = other DNA
gctcacccatgcacaca

SEQ ID NO: 23176 - DNA, 17 bp, synthetic construct
  misc_feature 1..17: note = Oligonucleotide
  source 1..17: mol_type = other DNA
tccgctcacccatgcac

SEQ ID NO: 23177 - DNA, 17 bp, synthetic construct
  misc_feature 1..17: note = Oligonucleotide
  source 1..17: mol_type = other DNA
gtatccgctcacccatg

SEQ ID NO: 23178 - DNA, 17 bp, synthetic construct
  misc_feature 1..17: note = Oligonucleotide
  source 1..17: mol_type = other DNA
tgcgtatccgctcaccc

SEQ ID NO: 23179 - DNA, 17 bp, synthetic construct
  misc_feature 1..17: note = Oligonucleotide
  source 1..17: mol_type = other DNA
cagtgcgtatccgctca

SEQ ID NO: 23180 - DNA, 17 bp, synthetic construct
  misc_feature 1..17: note = Oligonucleotide
  source 1..17: mol_type = other DNA
acacagtgcgtatccgc

SEQ ID NO: 23181 - DNA, 17 bp, synthetic construct
  misc_feature 1..17: note = Oligonucleotide
  source 1..17: mol_type = other DNA
cgcacacagtgcgtatc

SEQ ID NO: 23182 - DNA, 17 bp, synthetic construct
  misc_feature 1..17: note = Oligonucleotide
  source 1..17: mol_type = other DNA
aggcgcacacagtgcgt

SEQ ID NO: 23183 - DNA, 17 bp, synthetic construct
  misc_feature 1..17: note = Oligonucleotide
  source 1..17: mol_type = other DNA
tgcaggcgcacacagtg

SEQ ID NO: 23184 - DNA, 17 bp, synthetic construct
  misc_feature 1..17: note = Oligonucleotide
  source 1..17: mol_type = other DNA
gcatgcaggcgcacaca

SEQ ID NO: 23185 - DNA, 17 bp, synthetic construct
  misc_feature 1..17: note = Oligonucleotide
  source 1..17: mol_type = other DNA
cacgcatgcaggcgcac

SEQ ID NO: 23186 - DNA, 17 bp, synthetic construct
  misc_feature 1..17: note = Oligonucleotide
  source 1..17: mol_type = other DNA
ccacacgcatgcaggcg

SEQ ID NO: 23187 - DNA, 17 bp, synthetic construct
  misc_feature 1..17: note = Oligonucleotide
  source 1..17: mol_type = other DNA
gtgccacacgcatgcag

SEQ ID NO: 23188 - DNA, 17 bp, synthetic construct
  misc_feature 1..17: note = Oligonucleotide
  source 1..17: mol_type = other DNA
tgtgtgccacacgcatg

SEQ ID NO: 23189 - DNA, 17 bp, synthetic construct
  misc_feature 1..17: note = Oligonucleotide
  source 1..17: mol_type = other DNA
acatgtgtgccacacgc

SEQ ID NO: 23190 - DNA, 17 bp, synthetic construct
  misc_feature 1..17: note = Oligonucleotide
  source 1..17: mol_type = other DNA
cagacatgtgtgccaca

SEQ ID NO: 23191 - DNA, 17 bp, synthetic construct
  misc_feature 1..17: note = Oligonucleotide
  source 1..17: mol_type = other DNA
gcacagacatgtgtgcc

SEQ ID NO: 23192 - DNA, 17 bp, synthetic construct
  misc_feature 1..17: note = Oligonucleotide
  source 1..17: mol_type = other DNA
cacgcacagacatgtgt

SEQ ID NO: 23193 - DNA, 17 bp, synthetic construct
  misc_feature 1..17: note = Oligonucleotide
  source 1..17: mol_type = other DNA
acccacgcacagacatg

SEQ ID NO: 23194 - DNA, 17 bp, synthetic construct
  misc_feature 1..17: note = Oligonucleotide
  source 1..17: mol_type = other DNA
ctcacccacgcacagac

SEQ ID NO: 23195 - DNA, 17 bp, synthetic construct
  misc_feature 1..17: note = Oligonucleotide
  source 1..17: mol_type = other DNA
ctgctcacccacgcaca

SEQ ID NO: 23196 - DNA, 17 bp, synthetic construct
  misc_feature 1..17: note = Oligonucleotide
  source 1..17: mol_type = other DNA
cgtctgctcacccacgc

SEQ ID NO: 23197 - DNA, 17 bp, synthetic construct
  misc_feature 1..17: note = Oligonucleotide
  source 1..17: mol_type = other DNA
gcgcgtctgctcaccca

SEQ ID NO: 23198 - DNA, 17 bp, synthetic construct
  misc_feature 1..17: note = Oligonucleotide
  source 1..17: mol_type = other DNA
acagcgcgtctgctcac

SEQ ID NO: 23199 - DNA, 17 bp, synthetic construct
  misc_feature 1..17: note = Oligonucleotide
  source 1..17: mol_type = other DNA
cacacagcgcgtctgct

SEQ ID NO: 23200 - DNA, 17 bp, synthetic construct
  misc_feature 1..17: note = Oligonucleotide
  source 1..17: mol_type = other DNA
gtgcacacagcgcgtct

SEQ ID NO: 23201 - DNA, 17 bp, synthetic construct
  misc_feature 1..17: note = Oligonucleotide
  source 1..17: mol_type = other DNA
caggtgcacacagcgcg

SEQ ID NO: 23202 - DNA, 17 bp, synthetic construct
  misc_feature 1..17: note = Oligonucleotide
  source 1..17: mol_type = other DNA
atgcaggtgcacacagc

SEQ ID NO: 23203 - DNA, 17 bp, synthetic construct
  misc_feature 1..17: note = Oligonucleotide
  source 1..17: mol_type = other DNA
cgcatgcaggtgcacac

SEQ ID NO: 23204 - DNA, 17 bp, synthetic construct
  misc_feature 1..17: note = Oligonucleotide
  source 1..17: mol_type = other DNA
acacgcatgcaggtgca

SEQ ID NO: 23205 - DNA, 17 bp, synthetic construct
  misc_feature 1..17: note = Oligonucleotide
  source 1..17: mol_type = other DNA
gccacacgcatgcaggt

SEQ ID NO: 23206 - DNA, 17 bp, synthetic construct
  misc_feature 1..17: note = Oligonucleotide
  source 1..17: mol_type = other DNA
tgtgccacacgcatgca

SEQ ID NO: 23207 - DNA, 17 bp, synthetic construct
  misc_feature 1..17: note = Oligonucleotide
  source 1..17: mol_type = other DNA
acgtgtgccacacgcat

SEQ ID NO: 23208 - DNA, 17 bp, synthetic construct
  misc_feature 1..17: note = Oligonucleotide
  source 1..17: mol_type = other DNA
cacacgtgtgccacacg

SEQ ID NO: 23209 - DNA, 17 bp, synthetic construct
  misc_feature 1..17: note = Oligonucleotide
  source 1..17: mol_type = other DNA
gcacacacgtgtgccac

SEQ ID NO: 23210 - DNA, 17 bp, synthetic construct
  misc_feature 1..17: note = Oligonucleotide
  source 1..17: mol_type = other DNA
cacgcacacacgtgtgc

SEQ ID NO: 23211 - DNA, 17 bp, synthetic construct
  misc_feature 1..17: note = Oligonucleotide
  source 1..17: mol_type = other DNA
acccacgcacacacgtg

SEQ ID NO: 23212 - DNA, 17 bp, synthetic construct
  misc_feature 1..17: note = Oligonucleotide
  source 1..17: mol_type = other DNA
ctcacccacgcacacac

SEQ ID NO: 23213 - DNA, 17 bp, synthetic construct
  misc_feature 1..17: note = Oligonucleotide
  source 1..17: mol_type = other DNA
ccgctcacccacgcaca

SEQ ID NO: 23214 - DNA, 17 bp, synthetic construct
  misc_feature 1..17: note = Oligonucleotide
  source 1..17: mol_type = other DNA
tatccgctcacccacgc

SEQ ID NO: 23215 - DNA, 17 bp, synthetic construct
  misc_feature 1..17: note = Oligonucleotide
  source 1..17: mol_type = other DNA
gcgtatccgctcaccca

SEQ ID NO: 23216 - DNA, 17 bp, synthetic construct
  misc_feature 1..17: note = Oligonucleotide
  source 1..17: mol_type = other DNA
agcgcgtatccgctcac

SEQ ID NO: 23217 - DNA, 17 bp, synthetic construct
  misc_feature 1..17: note = Oligonucleotide
  source 1..17: mol_type = other DNA
tacagcgcgtatccgct

SEQ ID NO: 23218 - DNA, 17 bp, synthetic construct
  misc_feature 1..17: note = Oligonucleotide
  source 1..17: mol_type = other DNA
gcatacagcgcgtatcc

SEQ ID NO: 23219 - DNA, 17 bp, synthetic construct
  misc_feature 1..17: note = Oligonucleotide
  source 1..17: mol_type = other DNA
ggtgcatacagcgcgta

SEQ ID NO: 23220 - DNA, 17 bp, synthetic construct
  misc_feature 1..17: note = Oligonucleotide
  source 1..17: mol_type = other DNA
gcaggtgcatacagcgc

SEQ ID NO: 23221 - DNA, 17 bp, synthetic construct
  misc_feature 1..17: note = Oligonucleotide
  source 1..17: mol_type = other DNA
cacgcaggtgcatacag

SEQ ID NO: 23222 - DNA, 17 bp, synthetic construct
  misc_feature 1..17: note = Oligonucleotide
  source 1..17: mol_type = other DNA
atgcacgcaggtgcata

SEQ ID NO: 23223 - DNA, 17 bp, synthetic construct
  misc_feature 1..17: note = Oligonucleotide
  source 1..17: mol_type = other DNA
tgcatgcacgcaggtgc

SEQ ID NO: 23224 - DNA, 17 bp, synthetic construct
  misc_feature 1..17: note = Oligonucleotide
  source 1..17: mol_type = other DNA
tgctgcatgcacgcagg

SEQ ID NO: 23225 - DNA, 17 bp, synthetic construct
  misc_feature 1..17: note = Oligonucleotide
  source 1..17: mol_type = other DNA
gtgtgctgcatgcacgc

SEQ ID NO: 23226 - DNA, 17 bp, synthetic construct
  misc_feature 1..17: note = Oligonucleotide
  source 1..17: mol_type = other DNA
gacgtgtgctgcatgca

SEQ ID NO: 23227 - DNA, 17 bp, synthetic construct
  misc_feature 1..17: note = Oligonucleotide
  source 1..17: mol_type = other DNA
acagacgtgtgctgcat

SEQ ID NO: 23228 - DNA, 17 bp, synthetic construct
  misc_feature 1..17: note = Oligonucleotide
  source 1..17: mol_type = other DNA
cgcacagacgtgtgctg

SEQ ID NO: 23229 - DNA, 17 bp, synthetic construct
  misc_feature 1..17: note = Oligonucleotide
  source 1..17: mol_type = other DNA
ccacgcacagacgtgtg

SEQ ID NO: 23230 - DNA, 17 bp, synthetic construct
  misc_feature 1..17: note = Oligonucleotide
  source 1..17: mol_type = other DNA
cacccacgcacagacgt

SEQ ID NO: 23231 - DNA, 17 bp, synthetic construct
  misc_feature 1..17: note = Oligonucleotide
  source 1..17: mol_type = other DNA
gctcacccacgcacaga

SEQ ID NO: 23232 - DNA, 17 bp, synthetic construct
  misc_feature 1..17: note = Oligonucleotide
  source 1..17: mol_type = other DNA
tccgctcacccacgcac

SEQ ID NO: 23233 - DNA, 17 bp, synthetic construct
  misc_feature 1..17: note = Oligonucleotide
  source 1..17: mol_type = other DNA
gtatccgctcacccacg

SEQ ID NO: 23234 - DNA, 17 bp, synthetic construct
  misc_feature 1..17: note = Oligonucleotide
  source 1..17: mol_type = other DNA
cgcgtatccgctcaccc

SEQ ID NO: 23235 - DNA, 17 bp, synthetic construct
  misc_feature 1..17: note = Oligonucleotide
  source 1..17: mol_type = other DNA
cagcgcgtatccgctca

SEQ ID NO: 23236 - DNA, 17 bp, synthetic construct
  misc_feature 1..17: note = Oligonucleotide
  source 1..17: mol_type = other DNA
acacagcgcgtatccgc

SEQ ID NO: 23237 - DNA, 17 bp, synthetic construct
  misc_feature 1..17: note = Oligonucleotide
  source 1..17: mol_type = other DNA
cgcacacagcgcgtatc

SEQ ID NO: 23238 - DNA, 17 bp, synthetic construct
  misc_feature 1..17: note = Oligonucleotide
  source 1..17: mol_type = other DNA
aggcgcacacagcgcgt

SEQ ID NO: 23239 - DNA, 17 bp, synthetic construct
  misc_feature 1..17: note = Oligonucleotide
  source 1..17: mol_type = other DNA
tgcaggcgcacacagcg

SEQ ID NO: 23240 - DNA, 17 bp, synthetic construct
  misc_feature 1..17: note = Oligonucleotide
  source 1..17: mol_type = other DNA
gcatgcaggcgcacaca

SEQ ID NO: 23241 - DNA, 17 bp, synthetic construct
  misc_feature 1..17: note = Oligonucleotide
  source 1..17: mol_type = other DNA
cacgcatgcaggcgcac

SEQ ID NO: 23242 - DNA, 17 bp, synthetic construct
  misc_feature 1..17: note = Oligonucleotide
  source 1..17: mol_type = other DNA
ccacacgcatgcaggcg

SEQ ID NO: 23243 - DNA, 17 bp, synthetic construct
  misc_feature 1..17: note = Oligonucleotide
  source 1..17: mol_type = other DNA
gtgccacacgcatgcag

SEQ ID NO: 23244 - DNA, 17 bp, synthetic construct
  misc_feature 1..17: note = Oligonucleotide
  source 1..17: mol_type = other DNA
cgtgtgccacacgcatg

SEQ ID NO: 23245 - DNA, 17 bp, synthetic construct
  misc_feature 1..17: note = Oligonucleotide
  source 1..17: mol_type = other DNA
agacgtgtgccacacgc

SEQ ID NO: 23246 - DNA, 17 bp, synthetic construct
  misc_feature 1..17: note = Oligonucleotide
  source 1..17: mol_type = other DNA
cacagacgtgtgccaca

SEQ ID NO: 23247 - DNA, 17 bp, synthetic construct
  misc_feature 1..17: note = Oligonucleotide
  source 1..17: mol_type = other DNA
acgcacagacgtgtgcc

SEQ ID NO: 23248 - DNA, 17 bp, synthetic construct
  misc_feature 1..17: note = Oligonucleotide
  source 1..17: mol_type = other DNA
cccacgcacagacgtgt

SEQ ID NO: 23249 - DNA, 17 bp, synthetic construct
  misc_feature 1..17: note = Oligonucleotide
  source 1..17: mol_type = other DNA
tcacccacgcacagacg

SEQ ID NO: 23250 - DNA, 17 bp, synthetic construct
  misc_feature 1..17: note = Oligonucleotide
  source 1..17: mol_type = other DNA
cgctcacccacgcacag

SEQ ID NO: 23251 - DNA, 17 bp, synthetic construct
  misc_feature 1..17: note = Oligonucleotide
  source 1..17: mol_type = other DNA
atccgctcacccacgca

SEQ ID NO: 23252 - DNA, 17 bp, synthetic construct
  misc_feature 1..17: note = Oligonucleotide
  source 1..17: mol_type = other DNA
catatccgctcacccac

SEQ ID NO: 23253 - DNA, 17 bp, synthetic construct
  misc_feature 1..17: note = Oligonucleotide
  source 1..17: mol_type = other DNA
ctgcatatccgctcacc

SEQ ID NO: 23254 - DNA, 17 bp, synthetic construct
  misc_feature 1..17: note = Oligonucleotide
  source 1..17: mol_type = other DNA
acactgcatatccgctc

SEQ ID NO: 23255 - DNA, 17 bp, synthetic construct
  misc_feature 1..17: note = Oligonucleotide
  source 1..17: mol_type = other DNA
cgcacactgcatatccg

SEQ ID NO: 23256 - DNA, 17 bp, synthetic construct
  misc_feature 1..17: note = Oligonucleotide
  source 1..17: mol_type = other DNA
aggcgcacactgcatat

SEQ ID NO: 23257 - DNA, 17 bp, synthetic construct
  misc_feature 1..17: note = Oligonucleotide
  source 1..17: mol_type = other DNA
tgcaggcgcacactgca

SEQ ID NO: 23258 - DNA, 17 bp, synthetic construct
  misc_feature 1..17: note = Oligonucleotide
  source 1..17: mol_type = other DNA
gcatgcaggcgcacact

SEQ ID NO: 23259 - DNA, 17 bp, synthetic construct
  misc_feature 1..17: note = Oligonucleotide
  source 1..17: mol_type = other DNA
cacgcatgcaggcgcac

SEQ ID NO: 23260 - DNA, 17 bp, synthetic construct
  misc_feature 1..17: note = Oligonucleotide
  source 1..17: mol_type = other DNA
ccacacgcatgcaggcg

SEQ ID NO: 23261 - DNA, 17 bp, synthetic construct
  misc_feature 1..17: note = Oligonucleotide
  source 1..17: mol_type = other DNA
gtgccacacgcatgcag

SEQ ID NO: 23262 - DNA, 17 bp, synthetic construct
  misc_feature 1..17: note = Oligonucleotide
  source 1..17: mol_type = other DNA
cgtgtgccacacgcatg

SEQ ID NO: 23263 - DNA, 17 bp, synthetic construct
  misc_feature 1..17: note = Oligonucleotide
  source 1..17: mol_type = other DNA
acacgtgtgccacacgc

SEQ ID NO: 23264 - DNA, 17 bp, synthetic construct
  misc_feature 1..17: note = Oligonucleotide
  source 1..17: mol_type = other DNA
cacacacgtgtgccaca

SEQ ID NO: 23265 - DNA, 17 bp, synthetic construct
  misc_feature 1..17: note = Oligonucleotide
  source 1..17: mol_type = other DNA
acgcacacacgtgtgcc

SEQ ID NO: 23266 - DNA, 17 bp, synthetic construct
  misc_feature 1..17: note = Oligonucleotide
  source 1..17: mol_type = other DNA
cccacgcacacacgtgt

SEQ ID NO: 23267 - DNA, 17 bp, synthetic construct
  misc_feature 1..17: note = Oligonucleotide
  source 1..17: mol_type = other DNA
tcacccacgcacacacg

SEQ ID NO: 23268 - DNA, 17 bp, synthetic construct
  misc_feature 1..17: note = Oligonucleotide
  source 1..17: mol_type = other DNA
cgctcacccacgcacac

SEQ ID NO: 23269 - DNA, 17 bp, synthetic construct
  misc_feature 1..17: note = Oligonucleotide
  source 1..17: mol_type = other DNA
atccgctcacccacgca

SEQ ID NO: 23270 - DNA, 17 bp, synthetic construct
  misc_feature 1..17: note = Oligonucleotide
  source 1..17: mol_type = other DNA
cgtatccgctcacccac

SEQ ID NO: 23271 - DNA, 17 bp, synthetic construct
  misc_feature 1..17: note = Oligonucleotide
  source 1..17: mol_type = other DNA
gcgcgtatccgctcacc

SEQ ID NO: 23272 - DNA, 17 bp, synthetic construct
  misc_feature 1..17: note = Oligonucleotide
  source 1..17: mol_type = other DNA
acagcgcgtatccgctc

SEQ ID NO: 23273 - DNA, 17 bp, synthetic construct
  misc_feature 1..17: note = Oligonucleotide
  source 1..17: mol_type = other DNA
cacacagcgcgtatccg

SEQ ID NO: 23274 - DNA, 17 bp, synthetic construct
  misc_feature 1..17: note = Oligonucleotide
  source 1..17: mol_type = other DNA
gggcacacagcgcgtat

SEQ ID NO: 23275 - DNA, 17 bp, synthetic construct
  misc_feature 1..17: note = Oligonucleotide
  source 1..17: mol_type = other DNA
caggggcacacagcgcg

SEQ ID NO: 23276 - DNA, 17 bp, synthetic construct
  misc_feature 1..17: note = Oligonucleotide
  source 1..17: mol_type = other DNA
acgcaggggcacacagc

SEQ ID NO: 23277 - DNA, 17 bp, synthetic construct
  misc_feature 1..17: note = Oligonucleotide
  source 1..17: mol_type = other DNA
tgcacgcaggggcacac

SEQ ID NO: 23278 - DNA, 17 bp, synthetic construct
  misc_feature 1..17: note = Oligonucleotide
  source 1..17: mol_type = other DNA
gcatgcacgcaggggca

SEQ ID NO: 23279 - DNA, 17 bp, synthetic construct
  misc_feature 1..17: note = Oligonucleotide
  source 1..17: mol_type = other DNA
gctgcatgcacgcaggg

SEQ ID NO: 23280 - DNA, 17 bp, synthetic construct
  misc_feature 1..17: note = Oligonucleotide
  source 1..17: mol_type = other DNA
tgtgctgcatgcacgca

SEQ ID NO: 23281 - DNA, 17 bp, synthetic construct
  misc_feature 1..17: note = Oligonucleotide
  source 1..17: mol_type = other DNA
atgtgtgctgcatgcac

SEQ ID NO: 23282 - DNA, 17 bp, synthetic construct
  misc_feature 1..17: note = Oligonucleotide
  source 1..17: mol_type = other DNA
gacatgtgtgctgcatg

SEQ ID NO: 23283 - DNA, 17 bp, synthetic construct
  misc_feature 1..17: note = Oligonucleotide
  source 1..17: mol_type = other DNA
acagacatgtgtgctgc

SEQ ID NO: 23284 - DNA, 17 bp, synthetic construct
  misc_feature 1..17: note = Oligonucleotide
  source 1..17: mol_type = other DNA
cgcacagacatgtgtgc

SEQ ID NO: 23285 - DNA, 17 bp, synthetic construct
  misc_feature 1..17: note = Oligonucleotide
  source 1..17: mol_type = other DNA
ccacgcacagacatgtg

SEQ ID NO: 23286 - DNA, 17 bp, synthetic construct
  misc_feature 1..17: note = Oligonucleotide
  source 1..17: mol_type = other DNA
cacccacgcacagacat

SEQ ID NO: 23287 - DNA, 17 bp, synthetic construct
  misc_feature 1..17: note = Oligonucleotide
  source 1..17: mol_type = other DNA
actcacccacgcacaga

SEQ ID NO: 23288 - DNA, 17 bp, synthetic construct
  misc_feature 1..17: note = Oligonucleotide
  source 1..17: mol_type = other DNA
tccactcacccacgcac

SEQ ID NO: 23289 - DNA, 17 bp, synthetic construct
  misc_feature 1..17: note = Oligonucleotide
  source 1..17: mol_type = other DNA
atgtccactcacccacg

SEQ ID NO: 23290 - DNA, 17 bp, synthetic construct
  misc_feature 1..17: note = Oligonucleotide
  source 1..17: mol_type = other DNA
cgcatgtccactcaccc

SEQ ID NO: 23291 - DNA, 17 bp, synthetic construct
  misc_feature 1..17: note = Oligonucleotide
  source 1..17: mol_type = other DNA
cagcgcatgtccactca

SEQ ID NO: 23292 - DNA, 17 bp, synthetic construct
  misc_feature 1..17: note = Oligonucleotide
  source 1..17: mol_type = other DNA
acacagcgcatgtccac

SEQ ID NO: 23293 - DNA, 17 bp, synthetic construct
  misc_feature 1..17: note = Oligonucleotide
  source 1..17: mol_type = other DNA
tgcacacagcgcatgtc

SEQ ID NO: 23294 - DNA, 17 bp, synthetic construct
  misc_feature 1..17: note = Oligonucleotide
  source 1..17: mol_type = other DNA
aggtgcacacagcgcat

SEQ ID NO: 23295 - DNA, 17 bp, synthetic construct
  misc_feature 1..17: note = Oligonucleotide
  source 1..17: mol_type = other DNA
tgcaggtgcacacagcg

SEQ ID NO: 23296 - DNA, 17 bp, synthetic construct
  misc_feature 1..17: note = Oligonucleotide
  source 1..17: mol_type = other DNA
gcatgcaggtgcacaca

SEQ ID NO: 23297 - DNA, 17 bp, synthetic construct
  misc_feature 1..17: note = Oligonucleotide
  source 1..17: mol_type = other DNA
catgcatgcaggtgcac

SEQ ID NO: 23298 - DNA, 17 bp, synthetic construct
  misc_feature 1..17: note = Oligonucleotide
  source 1..17: mol_type = other DNA
ccacatgcatgcaggtg

SEQ ID NO: 23299 - DNA, 17 bp, synthetic construct
  misc_feature 1..17: note = Oligonucleotide
  source 1..17: mol_type = other DNA
gtgccacatgcatgcag

SEQ ID NO: 23300 - DNA, 17 bp, synthetic construct
  misc_feature 1..17: note = Oligonucleotide
  source 1..17: mol_type = other DNA
tgtgtgccacatgcatg

SEQ ID NO: 23301 - DNA, 17 bp, synthetic construct
  misc_feature 1..17: note = Oligonucleotide
  source 1..17: mol_type = other DNA
gtgtgtgtgccacatgc

SEQ ID NO: 23302 - DNA, 17 bp, synthetic construct
  misc_feature 1..17: note = Oligonucleotide
  source 1..17: mol_type = other DNA
tgtgtgtgtgtgccaca

SEQ ID NO: 23303 - DNA, 17 bp, synthetic construct
  misc_feature 1..17: note = Oligonucleotide
  source 1..17: mol_type = other DNA
acttgtgtgtgtgtgcc

SEQ ID NO: 23304 - DNA, 17 bp, synthetic construct
  misc_feature 1..17: note = Oligonucleotide
  source 1..17: mol_type = other DNA
gggacttgtgtgtgtgt

SEQ ID NO: 23305 - DNA, 17 bp, synthetic construct
  misc_feature 1..17: note = Oligonucleotide
  source 1..17: mol_type = other DNA
gcagggacttgtgtgtg

SEQ ID NO: 23306 - DNA, 17 bp, synthetic construct
  misc_feature 1..17: note = Oligonucleotide
  source 1..17: mol_type = other DNA
caagcagggacttgtgt

SEQ ID NO: 23307 - DNA, 17 bp, synthetic construct
  misc_feature 1..17: note = Oligonucleotide
  source 1..17: mol_type = other DNA
ccacaagcagggacttg

SEQ ID NO: 23308 - DNA, 17 bp, synthetic construct
  misc_feature 1..17: note = Oligonucleotide
  source 1..17: mol_type = other DNA
caaccacaagcagggac

SEQ ID NO: 23309 - DNA, 17 bp, synthetic construct
  misc_feature 1..17: note = Oligonucleotide
  source 1..17: mol_type = other DNA
aaacaaccacaagcagg

SEQ ID NO: 23310 - DNA, 17 bp, synthetic construct
  misc_feature 1..17: note = Oligonucleotide
  source 1..17: mol_type = other DNA
aggaaacaaccacaagc

SEQ ID NO: 23311 - DNA, 17 bp, synthetic construct
  misc_feature 1..17: note = Oligonucleotide
  source 1..17: mol_type = other DNA
aggaggaaacaaccaca

SEQ ID NO: 23312 - DNA, 17 bp, synthetic construct
  misc_feature 1..17: note = Oligonucleotide
  source 1..17: mol_type = other DNA
ccaaggaggaaacaacc

SEQ ID NO: 23313 - DNA, 17 bp, synthetic construct
  misc_feature 1..17: note = Oligonucleotide
  source 1..17: mol_type = other DNA
aagccaaggaggaaaca

SEQ ID NO: 23314 - DNA, 17 bp, synthetic construct
  misc_feature 1..17: note = Oligonucleotide
  source 1..17: mol_type = other DNA
tgaaagccaaggaggaa

SEQ ID NO: 23315 - DNA, 17 bp, synthetic construct
  misc_feature 1..17: note = Oligonucleotide
  source 1..17: mol_type = other DNA
ccttgaaagccaaggag

SEQ ID NO: 23316 - DNA, 17 bp, synthetic construct
  misc_feature 1..17: note = Oligonucleotide
  source 1..17: mol_type = other DNA
atgccttgaaagccaag

SEQ ID NO: 23317 - DNA, 17 bp, synthetic construct
  misc_feature 1..17: note = Oligonucleotide
  source 1..17: mol_type = other DNA
tacatgccttgaaagcc

SEQ ID NO: 23318 - DNA, 17 bp, synthetic construct
  misc_feature 1..17: note = Oligonucleotide
  source 1..17: mol_type = other DNA
tggtacatgccttgaaa

SEQ ID NO: 23319 - DNA, 17 bp, synthetic construct
  misc_feature 1..17: note = Oligonucleotide
  source 1..17: mol_type = other DNA
agttggtacatgccttg

SEQ ID NO: 23320 - DNA, 17 bp, synthetic construct
  misc_feature 1..17: note = Oligonucleotide
  source 1..17: mol_type = other DNA
gtcagttggtacatgcc

SEQ ID NO: 23321 - DNA, 17 bp, synthetic construct
  misc_feature 1..17: note = Oligonucleotide
  source 1..17: mol_type = other DNA
ggagtcagttggtacat

SEQ ID NO: 23322 - DNA, 17 bp, synthetic construct
  misc_feature 1..17: note = Oligonucleotide
  source 1..17: mol_type = other DNA
tctggagtcagttggta

SEQ ID NO: 23323 - DNA, 17 bp, synthetic construct
  misc_feature 1..17: note = Oligonucleotide
  source 1..17: mol_type = other DNA
aactctggagtcagttg

SEQ ID NO: 23324 - DNA, 17 bp, synthetic construct
  misc_feature 1..17: note = Oligonucleotide
  source 1..17: mol_type = other DNA
cccaactctggagtcag

SEQ ID NO: 23325 - DNA, 17 bp, synthetic construct
  misc_feature 1..17: note = Oligonucleotide
  source 1..17: mol_type = other DNA
ctgcccaactctggagt

SEQ ID NO: 23326 - DNA, 17 bp, synthetic construct
  misc_feature 1..17: note = Oligonucleotide
  source 1..17: mol_type = other DNA
aatctgcccaactctgg

SEQ ID NO: 23327 - DNA, 17 bp, synthetic construct
  misc_feature 1..17: note = Oligonucleotide
  source 1..17: mol_type = other DNA
gcaaatctgcccaactc

SEQ ID NO: 23328 - DNA, 17 bp, synthetic construct
  misc_feature 1..17: note = Oligonucleotide
  source 1..17: mol_type = other DNA
atagcaaatctgcccaa

SEQ ID NO: 23329 - DNA, 17 bp, synthetic construct
  misc_feature 1..17: note = Oligonucleotide
  source 1..17: mol_type = other DNA
tgaatagcaaatctgcc

SEQ ID NO: 23330 - DNA, 17 bp, synthetic construct
  misc_feature 1..17: note = Oligonucleotide
  source 1..17: mol_type = other DNA
ccgtgaatagcaaatct

SEQ ID NO: 23331 - DNA, 17 bp, synthetic construct
  misc_feature 1..17: note = Oligonucleotide
  source 1..17: mol_type = other DNA
agaccgtgaatagcaaa

SEQ ID NO: 23332 - DNA, 17 bp, synthetic construct
  misc_feature 1..17: note = Oligonucleotide
  source 1..17: mol_type = other DNA
atcagaccgtgaatagc

SEQ ID NO: 23333 - DNA, 17 bp, synthetic construct
  misc_feature 1..17: note = Oligonucleotide
  source 1..17: mol_type = other DNA
tttatcagaccgtgaat

SEQ ID NO: 23334 - DNA, 17 bp, synthetic construct
  misc_feature 1..17: note = Oligonucleotide
  source 1..17: mol_type = other DNA
ctctttatcagaccgtg

SEQ ID NO: 23335 - DNA, 17 bp, synthetic construct
  misc_feature 1..17: note = Oligonucleotide
  source 1..17: mol_type = other DNA
cacctctttatcagacc

SEQ ID NO: 23336 - DNA, 17 bp, synthetic construct
  misc_feature 1..17: note = Oligonucleotide
  source 1..17: mol_type = other DNA
ctacacctctttatcag

SEQ ID NO: 23337 - DNA, 17 bp, synthetic construct
  misc_feature 1..17: note = Oligonucleotide
  source 1..17: mol_type = other DNA
agcctacacctctttat

SEQ ID NO: 23338 - DNA, 17 bp, synthetic construct
  misc_feature 1..17: note = Oligonucleotide
  source 1..17: mol_type = other DNA
cccagcctacacctctt

SEQ ID NO: 23339 - DNA, 17 bp, synthetic construct
  misc_feature 1..17: note = Oligonucleotide
  source 1..17: mol_type = other DNA
gcccccagcctacacct

SEQ ID NO: 23340 - DNA, 17 bp, synthetic construct
  misc_feature 1..17: note = Oligonucleotide
  source 1..17: mol_type = other DNA
tctgcccccagcctaca

SEQ ID NO: 23341 - DNA, 17 bp, synthetic construct
  misc_feature 1..17: note = Oligonucleotide
  source 1..17: mol_type = other DNA
aaatctgcccccagcct

SEQ ID NO: 23342 - DNA, 17 bp, synthetic construct
  misc_feature 1..17: note = Oligonucleotide
  source 1..17: mol_type = other DNA
cccaaatctgcccccag

SEQ ID NO: 23343 - DNA, 17 bp, synthetic construct
  misc_feature 1..17: note = Oligonucleotide
  source 1..17: mol_type = other DNA
cctcccaaatctgcccc

SEQ ID NO: 23344 - DNA, 17 bp, synthetic construct
  misc_feature 1..17: note = Oligonucleotide
  source 1..17: mol_type = other DNA
tgacctcccaaatctgc

SEQ ID NO: 23345 - DNA, 17 bp, synthetic construct
  misc_feature 1..17: note = Oligonucleotide
  source 1..17: mol_type = other DNA
ccatgacctcccaaatc

SEQ ID NO: 23346 - DNA, 17 bp, synthetic construct
  misc_feature 1..17: note = Oligonucleotide
  source 1..17: mol_type = other DNA
aaaccatgacctcccaa

SEQ ID NO: 23347 - DNA, 17 bp, synthetic construct
  misc_feature 1..17: note = Oligonucleotide
  source 1..17: mol_type = other DNA
caaaaaccatgacctcc

SEQ ID NO: 23348 - DNA, 17 bp, synthetic construct
  misc_feature 1..17: note = Oligonucleotide
  source 1..17: mol_type = other DNA
ccccaaaaaccatgacc

SEQ ID NO: 23349 - DNA, 17 bp, synthetic construct
  misc_feature 1..17: note = Oligonucleotide
  source 1..17: mol_type = other DNA
ctcccccaaaaaccatg

SEQ ID NO: 23350 - DNA, 17 bp, synthetic construct
  misc_feature 1..17: note = Oligonucleotide
  source 1..17: mol_type = other DNA
cacctcccccaaaaacc

SEQ ID NO: 23351 - DNA, 17 bp, synthetic construct
  misc_feature 1..17: note = Oligonucleotide
  source 1..17: mol_type = other DNA
caccacctcccccaaaa

SEQ ID NO: 23352 - DNA, 17 bp, synthetic construct
  misc_feature 1..17: note = Oligonucleotide
  source 1..17: mol_type = other DNA
caccaccacctccccca

SEQ ID NO: 23353 - DNA, 17 bp, synthetic construct
  misc_feature 1..17: note = Oligonucleotide
  source 1..17: mol_type = other DNA
tctcaccaccacctccc

SEQ ID NO: 23354 - DNA, 17 bp, synthetic construct
  misc_feature 1..17: note = Oligonucleotide
  source 1..17: mol_type = other DNA
ccctctcaccaccacct

SEQ ID NO: 23355 - DNA, 17 bp, synthetic construct
  misc_feature 1..17: note = Oligonucleotide
  source 1..17: mol_type = other DNA
catccctctcaccacca

SEQ ID NO: 23356 - DNA, 17 bp, synthetic construct
  misc_feature 1..17: note = Oligonucleotide
  source 1..17: mol_type = other DNA
ccccatccctctcacca

SEQ ID NO: 23357 - DNA, 17 bp, synthetic construct
  misc_feature 1..17: note = Oligonucleotide
  source 1..17: mol_type = other DNA
ccaccccatccctctca

SEQ ID NO: 23358 - DNA, 17 bp, synthetic construct
  misc_feature 1..17: note = Oligonucleotide
  source 1..17: mol_type = other DNA
tccccaccccatccctc

SEQ ID NO: 23359 - DNA, 17 bp, synthetic construct
  misc_feature 1..17: note = Oligonucleotide
  source 1..17: mol_type = other DNA
atttccccaccccatcc

SEQ ID NO: 23360 - DNA, 17 bp, synthetic construct
  misc_feature 1..17: note = Oligonucleotide
  source 1..17: mol_type = other DNA
ctcatttccccacccca

SEQ ID NO: 23361 - DNA, 17 bp, synthetic construct
  misc_feature 1..17: note = Oligonucleotide
  source 1..17: mol_type = other DNA
acactcatttccccacc

SEQ ID NO: 23362 - DNA, 17 bp, synthetic construct
  misc_feature 1..17: note = Oligonucleotide
  source 1..17: mol_type = other DNA
tccacactcatttcccc

SEQ ID NO: 23363 - DNA, 17 bp, synthetic construct
  misc_feature 1..17: note = Oligonucleotide
  source 1..17: mol_type = other DNA
ttatccacactcatttc

SEQ ID NO: 23364 - DNA, 17 bp, synthetic construct
  misc_feature 1..17: note = Oligonucleotide
  source 1..17: mol_type = other DNA
ccattatccacactcat

SEQ ID NO: 23365 - DNA, 17 bp, synthetic construct
  misc_feature 1..17: note = Oligonucleotide
  source 1..17: mol_type = other DNA
gccccattatccacact

SEQ ID NO: 23366 - DNA, 17 bp, synthetic construct
  misc_feature 1..17: note = Oligonucleotide
  source 1..17: mol_type = other DNA
cgggccccattatccac

SEQ ID NO: 23367 - DNA, 17 bp, synthetic construct
  misc_feature 1..17: note = Oligonucleotide
  source 1..17: mol_type = other DNA
acccgggccccattatc

SEQ ID NO: 23368 - DNA, 17 bp, synthetic construct
  misc_feature 1..17: note = Oligonucleotide
  source 1..17: mol_type = other DNA
ggcacccgggccccatt

SEQ ID NO: 23369 - DNA, 17 bp, synthetic construct
  misc_feature 1..17: note = Oligonucleotide
  source 1..17: mol_type = other DNA
ctcggcacccgggcccc

SEQ ID NO: 23370 - DNA, 17 bp, synthetic construct
  misc_feature 1..17: note = Oligonucleotide
  source 1..17: mol_type = other DNA
aggctcggcacccgggc

SEQ ID NO: 23371 - DNA, 17 bp, synthetic construct
  misc_feature 1..17: note = Oligonucleotide
  source 1..17: mol_type = other DNA
ggcaggctcggcacccg

SEQ ID NO: 23372 - DNA, 17 bp, synthetic construct
  misc_feature 1..17: note = Oligonucleotide
  source 1..17: mol_type = other DNA
agaggcaggctcggcac

SEQ ID NO: 23373 - DNA, 17 bp, synthetic construct
  misc_feature 1..17: note = Oligonucleotide
  source 1..17: mol_type = other DNA
gtaagaggcaggctcgg

SEQ ID NO: 23374 - DNA, 17 bp, synthetic construct
  misc_feature 1..17: note = Oligonucleotide
  source 1..17: mol_type = other DNA
ggagtaagaggcaggct

SEQ ID NO: 23375 - DNA, 17 bp, synthetic construct
  misc_feature 1..17: note = Oligonucleotide
  source 1..17: mol_type = other DNA
aagggagtaagaggcag

SEQ ID NO: 23376 - DNA, 17 bp, synthetic construct
  misc_feature 1..17: note = Oligonucleotide
  source 1..17: mol_type = other DNA
gtaaagggagtaagagg

SEQ ID NO: 23377 - DNA, 17 bp, synthetic construct
  misc_feature 1..17: note = Oligonucleotide
  source 1..17: mol_type = other DNA
agagtaaagggagtaag

SEQ ID NO: 23378 - DNA, 17 bp, synthetic construct
  misc_feature 1..17: note = Oligonucleotide
  source 1..17: mol_type = other DNA
aacagagtaaagggagt

SEQ ID NO: 23379 - DNA, 17 bp, synthetic construct
  misc_feature 1..17: note = Oligonucleotide
  source 1..17: mol_type = other DNA
agaaacagagtaaaggg

SEQ ID NO: 23380 - DNA, 17 bp, synthetic construct
  misc_feature 1..17: note = Oligonucleotide
  source 1..17: mol_type = other DNA
tcaagaaacagagtaaa

SEQ ID NO: 23381 - DNA, 17 bp, synthetic construct
  misc_feature 1..17: note = Oligonucleotide
  source 1..17: mol_type = other DNA
gaatcaagaaacagagt

SEQ ID NO: 23382 - DNA, 17 bp, synthetic construct
  misc_feature 1..17: note = Oligonucleotide
  source 1..17: mol_type = other DNA
ttggaatcaagaaacag

SEQ ID NO: 23383 - DNA, 17 bp, synthetic construct
  misc_feature 1..17: note = Oligonucleotide
  source 1..17: mol_type = other DNA
ggcttggaatcaagaaa

SEQ ID NO: 23384 - DNA, 17 bp, synthetic construct
  misc_feature 1..17: note = Oligonucleotide
  source 1..17: mol_type = other DNA
ggaggcttggaatcaag

SEQ ID NO: 23385 - DNA, 17 bp, synthetic construct
  misc_feature 1..17: note = Oligonucleotide
  source 1..17: mol_type = other DNA
aatggaggcttggaatc

SEQ ID NO: 23386 - DNA, 17 bp, synthetic construct
  misc_feature 1..17: note = Oligonucleotide
  source 1..17: mol_type = other DNA
ccgaatggaggcttgga

SEQ ID NO: 23387 - DNA, 17 bp, synthetic construct
  misc_feature 1..17: note = Oligonucleotide
  source 1..17: mol_type = other DNA
tctccgaatggaggctt

SEQ ID NO: 23388 - DNA, 17 bp, synthetic construct
  misc_feature 1..17: note = Oligonucleotide
  source 1..17: mol_type = other DNA
tcttctccgaatggagg

SEQ ID NO: 23389 - DNA, 17 bp, synthetic construct
  misc_feature 1..17: note = Oligonucleotide
  source 1..17: mol_type = other DNA
ttttcttctccgaatgg

SEQ ID NO: 23390 - DNA, 17 bp, synthetic construct
  misc_feature 1..17: note = Oligonucleotide
  source 1..17: mol_type = other DNA
cccttttcttctccgaa

SEQ ID NO: 23391 - DNA, 17 bp, synthetic construct
  misc_feature 1..17: note = Oligonucleotide
  source 1..17: mol_type = other DNA
acccccttttcttctcc

SEQ ID NO: 23392 - DNA, 17 bp, synthetic construct
  misc_feature 1..17: note = Oligonucleotide
  source 1..17: mol_type = other DNA
ctcacccccttttcttc

SEQ ID NO: 23393 - DNA, 17 bp, synthetic construct
  misc_feature 1..17: note = Oligonucleotide
  source 1..17: mol_type = other DNA
tgactcacccccttttc

SEQ ID NO: 23394 - DNA, 17 bp, synthetic construct
  misc_feature 1..17: note = Oligonucleotide
  source 1..17: mol_type = other DNA
agatgactcaccccctt

SEQ ID NO: 23395 - DNA, 17 bp, synthetic construct
  misc_feature 1..17: note = Oligonucleotide
  source 1..17: mol_type = other DNA
ggcagatgactcacccc

SEQ ID NO: 23396 - DNA, 17 bp, synthetic construct
  misc_feature 1..17: note = Oligonucleotide
  source 1..17: mol_type = other DNA
tctctgcacagcaagga

SEQ ID NO: 23397 - DNA, 17 bp, synthetic construct
  misc_feature 1..17: note = Oligonucleotide
  source 1..17: mol_type = other DNA
gcttctctgcacagcaa

SEQ ID NO: 23398 - DNA, 17 bp, synthetic construct
  misc_feature 1..17: note = Oligonucleotide
  source 1..17: mol_type = other DNA
ccagcttctctgcacag

SEQ ID NO: 23399 - DNA, 17 bp, synthetic construct
  misc_feature 1..17: note = Oligonucleotide
  source 1..17: mol_type = other DNA
cgtccagcttctctgca

SEQ ID NO: 23400 - DNA, 17 bp, synthetic construct
  misc_feature 1..17: note = Oligonucleotide
  source 1..17: mol_type = other DNA
tctcgtccagcttctct

SEQ ID NO: 23401 - DNA, 17 bp, synthetic construct
  misc_feature 1..17: note = Oligonucleotide
  source 1..17: mol_type = other DNA
gcatctcgtccagcttc

SEQ ID NO: 23402 - DNA, 17 bp, synthetic construct
  misc_feature 1..17: note = Oligonucleotide
  source 1..17: mol_type = other DNA
ccagcatctcgtccagc

SEQ ID NO: 23403 - DNA, 17 bp, synthetic construct
  misc_feature 1..17: note = Oligonucleotide
  source 1..17: mol_type = other DNA
ctgccagcatctcgtcc

SEQ ID NO: 23404 - DNA, 17 bp, synthetic construct
  misc_feature 1..17: note = Oligonucleotide
  source 1..17: mol_type = other DNA
cggctgccagcatctcg

SEQ ID NO: 23405 - DNA, 17 bp, synthetic construct
  misc_feature 1..17: note = Oligonucleotide
  source 1..17: mol_type = other DNA
cggcggctgccagcatc

SEQ ID NO: 23406 - DNA, 17 bp, synthetic construct
  misc_feature 1..17: note = Oligonucleotide
  source 1..17: mol_type = other DNA
ctgcggcggctgccagc

SEQ ID NO: 23407 - DNA, 17 bp, synthetic construct
  misc_feature 1..17: note = Oligonucleotide
  source 1..17: mol_type = other DNA
gctctgcggcggctgcc

SEQ ID NO: 23408 - DNA, 17 bp, synthetic construct
  misc_feature 1..17: note = Oligonucleotide
  source 1..17: mol_type = other DNA
ttggctctgcggcggct

SEQ ID NO: 23409 - DNA, 17 bp, synthetic construct
  misc_feature 1..17: note = Oligonucleotide
  source 1..17: mol_type = other DNA
gcgttggctctgcggcg

SEQ ID NO: 23410 - DNA, 17 bp, synthetic construct
  misc_feature 1..17: note = Oligonucleotide
  source 1..17: mol_type = other DNA
gcagcgttggctctgcg

SEQ ID NO: 23411 - DNA, 17 bp, synthetic construct
  misc_feature 1..17: note = Oligonucleotide
  source 1..17: mol_type = other DNA
gccgcagcgttggctct

SEQ ID NO: 23412 - DNA, 17 bp, synthetic construct
  misc_feature 1..17: note = Oligonucleotide
  source 1..17: mol_type = other DNA
ctggccgcagcgttggc

SEQ ID NO: 23413 - DNA, 17 bp, synthetic construct
  misc_feature 1..17: note = Oligonucleotide
  source 1..17: mol_type = other DNA
tgtctggccgcagcgtt

SEQ ID NO: 23414 - DNA, 17 bp, synthetic construct
  misc_feature 1..17: note = Oligonucleotide
  source 1..17: mol_type = other DNA
cgatgtctggccgcagc

SEQ ID NO: 23415 - DNA, 17 bp, synthetic construct
  misc_feature 1..17: note = Oligonucleotide
  source 1..17: mol_type = other DNA
ctgcgatgtctggccgc

SEQ ID NO: 23416 - DNA, 17 bp, synthetic construct
  misc_feature 1..17: note = Oligonucleotide
  source 1..17: mol_type = other DNA
cgtctgcgatgtctggc

SEQ ID NO: 23417 - DNA, 17 bp, synthetic construct
  misc_feature 1..17: note = Oligonucleotide
  source 1..17: mol_type = other DNA
ctgcgtctgcgatgtct

SEQ ID NO: 23418 - DNA, 17 bp, synthetic construct
  misc_feature 1..17: note = Oligonucleotide
  source 1..17: mol_type = other DNA
agtctgcgtctgcgatg

SEQ ID NO: 23419 - DNA, 17 bp, synthetic construct
  misc_feature 1..17: note = Oligonucleotide
  source 1..17: mol_type = other DNA
tggagtctgcgtctgcg

SEQ ID NO: 23420 - DNA, 17 bp, synthetic construct
  misc_feature 1..17: note = Oligonucleotide
  source 1..17: mol_type = other DNA
ctctggagtctgcgtct

SEQ ID NO: 23421 - DNA, 17 bp, synthetic construct
  misc_feature 1..17: note = Oligonucleotide
  source 1..17: mol_type = other DNA
cggctctggagtctgcg

SEQ ID NO: 23422 - DNA, 17 bp, synthetic construct
  misc_feature 1..17: note = Oligonucleotide
  source 1..17: mol_type = other DNA
tggcggctctggagtct

SEQ ID NO: 23423 - DNA, 17 bp, synthetic construct
  misc_feature 1..17: note = Oligonucleotide
  source 1..17: mol_type = other DNA
cggtggcggctctggag

SEQ ID NO: 23424 - DNA, 17 bp, synthetic construct
  misc_feature 1..17: note = Oligonucleotide
  source 1..17: mol_type = other DNA
tgacggtggcggctctg

SEQ ID NO: 23425 - DNA, 17 bp, synthetic construct
  misc_feature 1..17: note = Oligonucleotide
  source 1..17: mol_type = other DNA
gtttgacggtggcggct

SEQ ID NO: 23426 - DNA, 17 bp, synthetic construct
  misc_feature 1..17: note = Oligonucleotide
  source 1..17: mol_type = other DNA
tctgtttgacggtggcg

SEQ ID NO: 23427 - DNA, 17 bp, synthetic construct
  misc_feature 1..17: note = Oligonucleotide
  source 1..17: mol_type = other DNA
gcctctgtttgacggtg

SEQ ID NO: 23428 - DNA, 17 bp, synthetic construct
  misc_feature 1..17: note = Oligonucleotide
  source 1..17: mol_type = other DNA
tgggcctctgtttgacg

SEQ ID NO: 23429 - DNA, 17 bp, synthetic construct
  misc_feature 1..17: note = Oligonucleotide
  source 1..17: mol_type = other DNA
tggtgggcctctgtttg

SEQ ID NO: 23430 - DNA, 17 bp, synthetic construct
  misc_feature 1..17: note = Oligonucleotide
  source 1..17: mol_type = other DNA
gactggtgggcctctgt

SEQ ID NO: 23431 - DNA, 17 bp, synthetic construct
  misc_feature 1..17: note = Oligonucleotide
  source 1..17: mol_type = other DNA
tccgactggtgggcctc

SEQ ID NO: 23432 - DNA, 17 bp, synthetic construct
  misc_feature 1..17: note = Oligonucleotide
  source 1..17: mol_type = other DNA
tcctccgactggtgggc

SEQ ID NO: 23433 - DNA, 17 bp, synthetic construct
  misc_feature 1..17: note = Oligonucleotide
  source 1..17: mol_type = other DNA
tgatcctccgactggtg

SEQ ID NO: 23434 - DNA, 17 bp, synthetic construct
  misc_feature 1..17: note = Oligonucleotide
  source 1..17: mol_type = other DNA
gtgtgatcctccgactg

SEQ ID NO: 23435 - DNA, 17 bp, synthetic construct
  misc_feature 1..17: note = Oligonucleotide
  source 1..17: mol_type = other DNA
cgggtgtgatcctccga

SEQ ID NO: 23436 - DNA, 17 bp, synthetic construct
  misc_feature 1..17: note = Oligonucleotide
  source 1..17: mol_type = other DNA
cggcgggtgtgatcctc

SEQ ID NO: 23437 - DNA, 17 bp, synthetic construct
  misc_feature 1..17: note = Oligonucleotide
  source 1..17: mol_type = other DNA
tctcggcgggtgtgatc

SEQ ID NO: 23438 - DNA, 17 bp, synthetic construct
  misc_feature 1..17: note = Oligonucleotide
  source 1..17: mol_type = other DNA
taatctcggcgggtgtg

SEQ ID NO: 23439 - DNA, 17 bp, synthetic construct
  misc_feature 1..17: note = Oligonucleotide
  source 1..17: mol_type = other DNA
cgctaatctcggcgggt

SEQ ID NO: 23440 - DNA, 17 bp, synthetic construct
  misc_feature 1..17: note = Oligonucleotide
  source 1..17: mol_type = other DNA
ttacgctaatctcggcg

SEQ ID NO: 23441 - DNA, 17 bp, synthetic construct
  misc_feature 1..17: note = Oligonucleotide
  source 1..17: mol_type = other DNA
cccttacgctaatctcg

SEQ ID NO: 23442 - DNA, 17 bp, synthetic construct
  misc_feature 1..17: note = Oligonucleotide
  source 1..17: mol_type = other DNA
tggcccttacgctaatc

SEQ ID NO: 23443 - DNA, 17 bp, synthetic construct
  misc_feature 1..17: note = Oligonucleotide
  source 1..17: mol_type = other DNA
ccgtggcccttacgcta

SEQ ID NO: 23444 - DNA, 17 bp, synthetic construct
  misc_feature 1..17: note = Oligonucleotide
  source 1..17: mol_type = other DNA
cgcccgtggcccttacg

SEQ ID NO: 23445 - DNA, 17 bp, synthetic construct
  misc_feature 1..17: note = Oligonucleotide
  source 1..17: mol_type = other DNA
agccgcccgtggccctt

SEQ ID NO: 23446 - DNA, 17 bp, synthetic construct
  misc_feature 1..17: note = Oligonucleotide
  source 1..17: mol_type = other DNA
cccagccgcccgtggcc

SEQ ID NO: 23447 - DNA, 17 bp, synthetic construct
  misc_feature 1..17: note = Oligonucleotide
  source 1..17: mol_type = other DNA
gctcccagccgcccgtg

SEQ ID NO: 23448 - DNA, 17 bp, synthetic construct
  misc_feature 1..17: note = Oligonucleotide
  source 1..17: mol_type = other DNA
agcgctcccagccgccc

SEQ ID NO: 23449 - DNA, 17 bp, synthetic construct
  misc_feature 1..17: note = Oligonucleotide
  source 1..17: mol_type = other DNA
cccagcgctcccagccg

SEQ ID NO: 23450 - DNA, 17 bp, synthetic construct
  misc_feature 1..17: note = Oligonucleotide
  source 1..17: mol_type = other DNA
cgacccagcgctcccag

SEQ ID NO: 23451 - DNA, 17 bp, synthetic construct
  misc_feature 1..17: note = Oligonucleotide
  source 1..17: mol_type = other DNA
gcccgacccagcgctcc

SEQ ID NO: 23452 - DNA, 17 bp, synthetic construct
  misc_feature 1..17: note = Oligonucleotide
  source 1..17: mol_type = other DNA
cctgcccgacccagcgc

SEQ ID NO: 23453 - DNA, 17 bp, synthetic construct
  misc_feature 1..17: note = Oligonucleotide
  source 1..17: mol_type = other DNA
atgcctgcccgacccag

SEQ ID NO: 23454 - DNA, 17 bp, synthetic construct
  misc_feature 1..17: note = Oligonucleotide
  source 1..17: mol_type = other DNA
cccatgcctgcccgacc

SEQ ID NO: 23455 - DNA, 17 bp, synthetic construct
  misc_feature 1..17: note = Oligonucleotide
  source 1..17: mol_type = other DNA
acccccatgcctgcccg

SEQ ID NO: 23456 - DNA, 17 bp, synthetic construct
  misc_feature 1..17: note = Oligonucleotide
  source 1..17: mol_type = other DNA
ctgacccccatgcctgc

SEQ ID NO: 23457 - DNA, 17 bp, synthetic construct
  misc_feature 1..17: note = Oligonucleotide
  source 1..17: mol_type = other DNA
agtctgacccccatgcc

SEQ ID NO: 23458 - DNA, 17 bp, synthetic construct
  misc_feature 1..17: note = Oligonucleotide
  source 1..17: mol_type = other DNA
gacagtctgacccccat

SEQ ID NO: 23459 - DNA, 17 bp, synthetic construct
  misc_feature 1..17: note = Oligonucleotide
  source 1..17: mol_type = other DNA
caggacagtctgacccc

SEQ ID NO: 23460 - DNA, 17 bp, synthetic construct
  misc_feature 1..17: note = Oligonucleotide
  source 1..17: mol_type = other DNA
gcccaggacagtctgac

SEQ ID NO: 23461 - DNA, 17 bp, synthetic construct
  misc_feature 1..17: note = Oligonucleotide
  source 1..17: mol_type = other DNA
agggcccaggacagtct

SEQ ID NO: 23462 - DNA, 17 bp, synthetic construct
  misc_feature 1..17: note = Oligonucleotide
  source 1..17: mol_type = other DNA
aagagggcccaggacag

SEQ ID NO: 23463 - DNA, 17 bp, synthetic construct
  misc_feature 1..17: note = Oligonucleotide
  source 1..17: mol_type = other DNA
gtcaagagggcccagga

SEQ ID NO: 23464 - DNA, 17 bp, synthetic construct
  misc_feature 1..17: note = Oligonucleotide
  source 1..17: mol_type = other DNA
tccgtcaagagggccca

SEQ ID NO: 23465 - DNA, 17 bp, synthetic construct
  misc_feature 1..17: note = Oligonucleotide
  source 1..17: mol_type = other DNA
acctccgtcaagagggc

SEQ ID NO: 23466 - DNA, 17 bp, synthetic construct
  misc_feature 1..17: note = Oligonucleotide
  source 1..17: mol_type = other DNA
ctcacctccgtcaagag

SEQ ID NO: 23467 - DNA, 17 bp, synthetic construct
  misc_feature 1..17: note = Oligonucleotide
  source 1..17: mol_type = other DNA
gctctcacctccgtcaa

SEQ ID NO: 23468 - DNA, 17 bp, synthetic construct
  misc_feature 1..17: note = Oligonucleotide
  source 1..17: mol_type = other DNA
taggctctcacctccgt

SEQ ID NO: 23469 - DNA, 17 bp, synthetic construct
  misc_feature 1..17: note = Oligonucleotide
  source 1..17: mol_type = other DNA
tgataggctctcacctc

SEQ ID NO: 23470 - DNA, 17 bp, synthetic construct
  misc_feature 1..17: note = Oligonucleotide
  source 1..17: mol_type = other DNA
acatgataggctctcac

SEQ ID NO: 23471 - DNA, 17 bp, synthetic construct
  misc_feature 1..17: note = Oligonucleotide
  source 1..17: mol_type = other DNA
tccacatgataggctct

SEQ ID NO: 23472 - DNA, 17 bp, synthetic construct
  misc_feature 1..17: note = Oligonucleotide
  source 1..17: mol_type = other DNA
gggtccacatgataggc

SEQ ID NO: 23473 - DNA, 17 bp, synthetic construct
  misc_feature 1..17: note = Oligonucleotide
  source 1..17: mol_type = other DNA
gaggggtccacatgata

SEQ ID NO: 23474 - DNA, 17 bp, synthetic construct
  misc_feature 1..17: note = Oligonucleotide
  source 1..17: mol_type = other DNA
ggagaggggtccacatg

SEQ ID NO: 23475 - DNA, 17 bp, synthetic construct
  misc_feature 1..17: note = Oligonucleotide
  source 1..17: mol_type = other DNA
tctggagaggggtccac

SEQ ID NO: 23476 - DNA, 17 bp, synthetic construct
  misc_feature 1..17: note = Oligonucleotide
  source 1..17: mol_type = other DNA
ccctctggagaggggtc

SEQ ID NO: 23477 - DNA, 17 bp, synthetic construct
  misc_feature 1..17: note = Oligonucleotide
  source 1..17: mol_type = other DNA
cacccctctggagaggg

SEQ ID NO: 23478 - DNA, 17 bp, synthetic construct
  misc_feature 1..17: note = Oligonucleotide
  source 1..17: mol_type = other DNA
acacacccctctggaga

SEQ ID NO: 23479 - DNA, 17 bp, synthetic construct
  misc_feature 1..17: note = Oligonucleotide
  source 1..17: mol_type = other DNA
tgcacacacccctctgg

SEQ ID NO: 23480 - DNA, 17 bp, synthetic construct
  misc_feature 1..17: note = Oligonucleotide
  source 1..17: mol_type = other DNA
gggtgcacacacccctc

SEQ ID NO: 23481 - DNA, 17 bp, synthetic construct
  misc_feature 1..17: note = Oligonucleotide
  source 1..17: mol_type = other DNA
atggggtgcacacaccc

SEQ ID NO: 23482 - DNA, 17 bp, synthetic construct
  misc_feature 1..17: note = Oligonucleotide
  source 1..17: mol_type = other DNA
gccatggggtgcacaca

SEQ ID NO: 23483 - DNA, 17 bp, synthetic construct
  misc_feature 1..17: note = Oligonucleotide
  source 1..17: mol_type = other DNA
gaggccatggggtgcac

SEQ ID NO: 23484 - DNA, 17 bp, synthetic construct
  misc_feature 1..17: note = Oligonucleotide
  source 1..17: mol_type = other DNA
agagaggccatggggtg

SEQ ID NO: 23485 - DNA, 17 bp, synthetic construct
  misc_feature 1..17: note = Oligonucleotide
  source 1..17: mol_type = other DNA
ctgagagaggccatggg

SEQ ID NO: 23486 - DNA, 17 bp, synthetic construct
  misc_feature 1..17: note = Oligonucleotide
  source 1..17: mol_type = other DNA
tctctgagagaggccat

SEQ ID NO: 23487 - DNA, 17 bp, synthetic construct
  misc_feature 1..17: note = Oligonucleotide
  source 1..17: mol_type = other DNA
gagtctctgagagaggc

SEQ ID NO: 23488 - DNA, 17 bp, synthetic construct
  misc_feature 1..17: note = Oligonucleotide
  source 1..17: mol_type = other DNA
caagagtctctgagaga

SEQ ID NO: 23489 - DNA, 17 bp, synthetic construct
  misc_feature 1..17: note = Oligonucleotide
  source 1..17: mol_type = other DNA
ccccaagagtctctgag

SEQ ID NO: 23490 - DNA, 17 bp, synthetic construct
  misc_feature 1..17: note = Oligonucleotide
  source 1..17: mol_type = other DNA
cagccccaagagtctct

SEQ ID NO: 23491 - DNA, 17 bp, synthetic construct
  misc_feature 1..17: note = Oligonucleotide
  source 1..17: mol_type = other DNA
agacagccccaagagtc

SEQ ID NO: 23492 - DNA, 17 bp, synthetic construct
  misc_feature 1..17: note = Oligonucleotide
  source 1..17: mol_type = other DNA
cagagacagccccaaga

SEQ ID NO: 23493 - DNA, 17 bp, synthetic construct
  misc_feature 1..17: note = Oligonucleotide
  source 1..17: mol_type = other DNA
gggcagagacagcccca

SEQ ID NO: 23494 - DNA, 17 bp, synthetic construct
  misc_feature 1..17: note = Oligonucleotide
  source 1..17: mol_type = other DNA
agggggcagagacagcc

SEQ ID NO: 23495 - DNA, 17 bp, synthetic construct
  misc_feature 1..17: note = Oligonucleotide
  source 1..17: mol_type = other DNA
tttagggggcagagaca

SEQ ID NO: 23496 - DNA, 17 bp, synthetic construct
  misc_feature 1..17: note = Oligonucleotide
  source 1..17: mol_type = other DNA
ccatttagggggcagag

SEQ ID NO: 23497 - DNA, 17 bp, synthetic construct
  misc_feature 1..17: note = Oligonucleotide
  source 1..17: mol_type = other DNA
tggccatttagggggca

SEQ ID NO: 23498 - DNA, 17 bp, synthetic construct
  misc_feature 1..17: note = Oligonucleotide
  source 1..17: mol_type = other DNA
ctgtggccatttagggg

SEQ ID NO: 23499 - DNA, 17 bp, synthetic construct
  misc_feature 1..17: note = Oligonucleotide
  source 1..17: mol_type = other DNA
gagctgtggccatttag

SEQ ID NO: 23500 - DNA, 17 bp, synthetic construct
  misc_feature 1..17: note = Oligonucleotide
  source 1..17: mol_type = other DNA
gctgagctgtggccatt

SEQ ID NO: 23501 - DNA, 17 bp, synthetic construct
  misc_feature 1..17: note = Oligonucleotide
  source 1..17: mol_type = other DNA
ggtgctgagctgtggcc

SEQ ID NO: 23502 - DNA, 17 bp, synthetic construct
  misc_feature 1..17: note = Oligonucleotide
  source 1..17: mol_type = other DNA
gcaggtgctgagctgtg

SEQ ID NO: 23503 - DNA, 17 bp, synthetic construct
  misc_feature 1..17: note = Oligonucleotide
  source 1..17: mol_type = other DNA
ccagcaggtgctgagct

SEQ ID NO: 23504 - DNA, 17 bp, synthetic construct
  misc_feature 1..17: note = Oligonucleotide
  source 1..17: mol_type = other DNA
aacccagcaggtgctga

SEQ ID NO: 23505 - DNA, 17 bp, synthetic construct
  misc_feature 1..17: note = Oligonucleotide
  source 1..17: mol_type = other DNA
gcaaacccagcaggtgc

SEQ ID NO: 23506 - DNA, 17 bp, synthetic construct
  misc_feature 1..17: note = Oligonucleotide
  source 1..17: mol_type = other DNA
agagcaaacccagcagg

SEQ ID NO: 23507 - DNA, 17 bp, synthetic construct
  misc_feature 1..17: note = Oligonucleotide
  source 1..17: mol_type = other DNA
acaagagcaaacccagc

SEQ ID NO: 23508 - DNA, 17 bp, synthetic construct
  misc_feature 1..17: note = Oligonucleotide
  source 1..17: mol_type = other DNA
gctacaagagcaaaccc

SEQ ID NO: 23509 - DNA, 17 bp, synthetic construct
  misc_feature 1..17: note = Oligonucleotide
  source 1..17: mol_type = other DNA
aaagctacaagagcaaa

SEQ ID NO: 23510 - DNA, 17 bp, synthetic construct
  misc_feature 1..17: note = Oligonucleotide
  source 1..17: mol_type = other DNA
ccaaaagctacaagagc

SEQ ID NO: 23511 - DNA, 17 bp, synthetic construct
  misc_feature 1..17: note = Oligonucleotide
  source 1..17: mol_type = other DNA
gcaccaaaagctacaag

SEQ ID NO: 23512 - DNA, 17 bp, synthetic construct
  misc_feature 1..17: note = Oligonucleotide
  source 1..17: mol_type = other DNA
gaggcaccaaaagctac

SEQ ID NO: 23513 - DNA, 17 bp, synthetic construct
  misc_feature 1..17: note = Oligonucleotide
  source 1..17: mol_type = other DNA
gcagaggcaccaaaagc

SEQ ID NO: 23514 - DNA, 17 bp, synthetic construct
  misc_feature 1..17: note = Oligonucleotide
  source 1..17: mol_type = other DNA
aaggcagaggcaccaaa

SEQ ID NO: 23515 - DNA, 17 bp, synthetic construct
  misc_feature 1..17: note = Oligonucleotide
  source 1..17: mol_type = other DNA
ctgaaggcagaggcacc

SEQ ID NO: 23516 - DNA, 17 bp, synthetic construct
  misc_feature 1..17: note = Oligonucleotide
  source 1..17: mol_type = other DNA
tgcctgaaggcagaggc

SEQ ID NO: 23517 - DNA, 17 bp, synthetic construct
  misc_feature 1..17: note = Oligonucleotide
  source 1..17: mol_type = other DNA
gactgcctgaaggcaga

SEQ ID NO: 23518 - DNA, 17 bp, synthetic construct
  misc_feature 1..17: note = Oligonucleotide
  source 1..17: mol_type = other DNA
agggactgcctgaaggc

SEQ ID NO: 23519 - DNA, 17 bp, synthetic construct
  misc_feature 1..17: note = Oligonucleotide
  source 1..17: mol_type = other DNA
gacagggactgcctgaa

SEQ ID NO: 23520 - DNA, 17 bp, synthetic construct
  misc_feature 1..17: note = Oligonucleotide
  source 1..17: mol_type = other DNA
tgagacagggactgcct

SEQ ID NO: 23521 - DNA, 17 bp, synthetic construct
  misc_feature 1..17: note = Oligonucleotide
  source 1..17: mol_type = other DNA
gcgtgagacagggactg

SEQ ID NO: 23522 - DNA, 17 bp, synthetic construct
  misc_feature 1..17: note = Oligonucleotide
  source 1..17: mol_type = other DNA
caggcgtgagacaggga

SEQ ID NO: 23523 - DNA, 17 bp, synthetic construct
  misc_feature 1..17: note = Oligonucleotide
  source 1..17: mol_type = other DNA
tctcaggcgtgagacag

SEQ ID NO: 23524 - DNA, 17 bp, synthetic construct
  misc_feature 1..17: note = Oligonucleotide
  source 1..17: mol_type = other DNA
tggtctcaggcgtgaga

SEQ ID NO: 23525 - DNA, 17 bp, synthetic construct
  misc_feature 1..17: note = Oligonucleotide
  source 1..17: mol_type = other DNA
tggtggtctcaggcgtg

SEQ ID NO: 23526 - DNA, 17 bp, synthetic construct
  misc_feature 1..17: note = Oligonucleotide
  source 1..17: mol_type = other DNA
ccttggtggtctcaggc

SEQ ID NO: 23527 - DNA, 17 bp, synthetic construct
  misc_feature 1..17: note = Oligonucleotide
  source 1..17: mol_type = other DNA
gtaccttggtggtctca

SEQ ID NO: 23528 - DNA, 17 bp, synthetic construct
  misc_feature 1..17: note = Oligonucleotide
  source 1..17: mol_type = other DNA
ggggtaccttggtggtc

SEQ ID NO: 23529 - DNA, 17 bp, synthetic construct
  misc_feature 1..17: note = Oligonucleotide
  source 1..17: mol_type = other DNA
gctggggtaccttggtg

SEQ ID NO: 23530 - DNA, 17 bp, synthetic construct
  misc_feature 1..17: note = Oligonucleotide
  source 1..17: mol_type = other DNA
ggagctggggtaccttg

SEQ ID NO: 23531 - DNA, 17 bp, synthetic construct
  misc_feature 1..17: note = Oligonucleotide
  source 1..17: mol_type = other DNA
agcggagctggggtacc

SEQ ID NO: 23532 - DNA, 17 bp, synthetic construct
  misc_feature 1..17: note = Oligonucleotide
  source 1..17: mol_type = other DNA
ctcagcggagctggggt

SEQ ID NO: 23533 - DNA, 17 bp, synthetic construct
  misc_feature 1..17: note = Oligonucleotide
  source 1..17: mol_type = other DNA
gttctcagcggagctgg

SEQ ID NO: 23534 - DNA, 17 bp, synthetic construct
  misc_feature 1..17: note = Oligonucleotide
  source 1..17: mol_type = other DNA
cgtgttctcagcggagc

SEQ ID NO: 23535 - DNA, 17 bp, synthetic construct
  misc_feature 1..17: note = Oligonucleotide
  source 1..17: mol_type = other DNA
tgtcgtgttctcagcgg

SEQ ID NO: 23536 - DNA, 17 bp, synthetic construct
  misc_feature 1..17: note = Oligonucleotide
  source 1..17: mol_type = other DNA
ctttgtcgtgttctcag

SEQ ID NO: 23537 - DNA, 17 bp, synthetic construct
  misc_feature 1..17: note = Oligonucleotide
  source 1..17: mol_type = other DNA
atgctttgtcgtgttct

SEQ ID NO: 23538 - DNA, 17 bp, synthetic construct
  misc_feature 1..17: note = Oligonucleotide
  source 1..17: mol_type = other DNA
gacatgctttgtcgtgt

SEQ ID NO: 23539 - DNA, 17 bp, synthetic construct
  misc_feature 1..17: note = Oligonucleotide
  source 1..17: mol_type = other DNA
agagacatgctttgtcg

SEQ ID NO: 23540 - DNA, 17 bp, synthetic construct
  misc_feature 1..17: note = Oligonucleotide
  source 1..17: mol_type = other DNA
aacagagacatgctttg

SEQ ID NO: 23541 - DNA, 17 bp, synthetic construct
  misc_feature 1..17: note = Oligonucleotide
  source 1..17: mol_type = other DNA
gggaacagagacatgct

SEQ ID NO: 23542 - DNA, 17 bp, synthetic construct
  misc_feature 1..17: note = Oligonucleotide
  source 1..17: mol_type = other DNA
gcagggaacagagacat

SEQ ID NO: 23543 - DNA, 17 bp, synthetic construct
  misc_feature 1..17: note = Oligonucleotide
  source 1..17: mol_type = other DNA
tgggcagggaacagaga

SEQ ID NO: 23544 - DNA, 17 bp, synthetic construct
  misc_feature 1..17: note = Oligonucleotide
  source 1..17: mol_type = other DNA
aagtgggcagggaacag

SEQ ID NO: 23545 - DNA, 17 bp, synthetic construct
  misc_feature 1..17: note = Oligonucleotide
  source 1..17: mol_type = other DNA
ggcaagtgggcagggaa

SEQ ID NO: 23546 - DNA, 17 bp, synthetic construct
  misc_feature 1..17: note = Oligonucleotide
  source 1..17: mol_type = other DNA
gttggcaagtgggcagg

SEQ ID NO: 23547 - DNA, 17 bp, synthetic construct
  misc_feature 1..17: note = Oligonucleotide
  source 1..17: mol_type = other DNA
cgggttggcaagtgggc

SEQ ID NO: 23548 - DNA, 17 bp, synthetic construct
  misc_feature 1..17: note = Oligonucleotide
  source 1..17: mol_type = other DNA
cgccgggttggcaagtg

SEQ ID NO: 23549 - DNA, 17 bp, synthetic construct
  misc_feature 1..17: note = Oligonucleotide
  source 1..17: mol_type = other DNA
aggcgccgggttggcaa

SEQ ID NO: 23550 - DNA, 17 bp, synthetic construct
  misc_feature 1..17: note = Oligonucleotide
  source 1..17: mol_type = other DNA
agaaggcgccgggttgg

SEQ ID NO: 23551 - DNA, 17 bp, synthetic construct
  misc_feature 1..17: note = Oligonucleotide
  source 1..17: mol_type = other DNA
cctagaaggcgccgggt

SEQ ID NO: 23552 - DNA, 17 bp, synthetic construct
  misc_feature 1..17: note = Oligonucleotide
  source 1..17: mol_type = other DNA
gagcctagaaggcgccg

SEQ ID NO: 23553 - DNA, 17 bp, synthetic construct
  misc_feature 1..17: note = Oligonucleotide
  source 1..17: mol_type = other DNA
gaggagcctagaaggcg

SEQ ID NO: 23554 - DNA, 17 bp, synthetic construct
  misc_feature 1..17: note = Oligonucleotide
  source 1..17: mol_type = other DNA
ggggaggagcctagaag

SEQ ID NO: 23555 - DNA, 17 bp, synthetic construct
  misc_feature 1..17: note = Oligonucleotide
  source 1..17: mol_type = other DNA
gtgggggaggagcctag

SEQ ID NO: 23556 - DNA, 17 bp, synthetic construct
  misc_feature 1..17: note = Oligonucleotide
  source 1..17: mol_type = other DNA
agggtgggggaggagcc

SEQ ID NO: 23557 - DNA, 17 bp, synthetic construct
  misc_feature 1..17: note = Oligonucleotide
  source 1..17: mol_type = other DNA
gtgagggtgggggagga

SEQ ID NO: 23558 - DNA, 17 bp, synthetic construct
  misc_feature 1..17: note = Oligonucleotide
  source 1..17: mol_type = other DNA
tgggtgagggtggggga

SEQ ID NO: 23559 - DNA, 17 bp, synthetic construct
  misc_feature 1..17: note = Oligonucleotide
  source 1..17: mol_type = other DNA
ccctgggtgagggtggg

SEQ ID NO: 23560 - DNA, 17 bp, synthetic construct
  misc_feature 1..17: note = Oligonucleotide
  source 1..17: mol_type = other DNA
cgaccctgggtgagggt

SEQ ID NO: 23561 - DNA, 17 bp, synthetic construct
  misc_feature 1..17: note = Oligonucleotide
  source 1..17: mol_type = other DNA
ggccgaccctgggtgag

SEQ ID NO: 23562 - DNA, 17 bp, synthetic construct
  misc_feature 1..17: note = Oligonucleotide
  source 1..17: mol_type = other DNA
cctggccgaccctgggt

SEQ ID NO: 23563 - DNA, 17 bp, synthetic construct
  misc_feature 1..17: note = Oligonucleotide
  source 1..17: mol_type = other DNA
gaccctggccgaccctg

SEQ ID NO: 23564 - DNA, 17 bp, synthetic construct
  misc_feature 1..17: note = Oligonucleotide
  source 1..17: mol_type = other DNA
gcagaccctggccgacc

SEQ ID NO: 23565 - DNA, 17 bp, synthetic construct
  misc_feature 1..17: note = Oligonucleotide
  source 1..17: mol_type = other DNA
ggtgcagaccctggccg

SEQ ID NO: 23566 - DNA, 17 bp, synthetic construct
  misc_feature 1..17: note = Oligonucleotide
  source 1..17: mol_type = other DNA
gtgggtgcagaccctgg

SEQ ID NO: 23567 - DNA, 17 bp, synthetic construct
  misc_feature 1..17: note = Oligonucleotide
  source 1..17: mol_type = other DNA
agggtgggtgcagaccc

SEQ ID NO: 23568 - DNA, 17 bp, synthetic construct
  misc_feature 1..17: note = Oligonucleotide
  source 1..17: mol_type = other DNA
ggcagggtgggtgcaga

SEQ ID NO: 23569 - DNA, 17 bp, synthetic construct
  misc_feature 1..17: note = Oligonucleotide
  source 1..17: mol_type = other DNA
ttgggcagggtgggtgc

SEQ ID NO: 23570 - DNA, 17 bp, synthetic construct
  misc_feature 1..17: note = Oligonucleotide
  source 1..17: mol_type = other DNA
gtgttgggcagggtggg

SEQ ID NO: 23571 - DNA, 17 bp, synthetic construct
  misc_feature 1..17: note = Oligonucleotide
  source 1..17: mol_type = other DNA
acggtgttgggcagggt

SEQ ID NO: 23572 - DNA, 17 bp, synthetic construct
  misc_feature 1..17: note = Oligonucleotide
  source 1..17: mol_type = other DNA
tagacggtgttgggcag

SEQ ID NO: 23573 - DNA, 17 bp, synthetic construct
  misc_feature 1..17: note = Oligonucleotide
  source 1..17: mol_type = other DNA
gtgtagacggtgttggg

SEQ ID NO: 23574 - DNA, 17 bp, synthetic construct
  misc_feature 1..17: note = Oligonucleotide
  source 1..17: mol_type = other DNA
acagtgtagacggtgtt

SEQ ID NO: 23575 - DNA, 17 bp, synthetic construct
  misc_feature 1..17: note = Oligonucleotide
  source 1..17: mol_type = other DNA
ggtacagtgtagacggt

SEQ ID NO: 23576 - DNA, 17 bp, synthetic construct
  misc_feature 1..17: note = Oligonucleotide
  source 1..17: mol_type = other DNA
ggtggtacagtgtagac

SEQ ID NO: 23577 - DNA, 17 bp, synthetic construct
  misc_feature 1..17: note = Oligonucleotide
  source 1..17: mol_type = other DNA
gatggtggtacagtgta

SEQ ID NO: 23578 - DNA, 17 bp, synthetic construct
  misc_feature 1..17: note = Oligonucleotide
  source 1..17: mol_type = other DNA
gcagatggtggtacagt

SEQ ID NO: 23579 - DNA, 17 bp, synthetic construct
  misc_feature 1..17: note = Oligonucleotide
  source 1..17: mol_type = other DNA
agtgcagatggtggtac

SEQ ID NO: 23580 - DNA, 17 bp, synthetic construct
  misc_feature 1..17: note = Oligonucleotide
  source 1..17: mol_type = other DNA
ggcagtgcagatggtgg

SEQ ID NO: 23581 - DNA, 17 bp, synthetic construct
  misc_feature 1..17: note = Oligonucleotide
  source 1..17: mol_type = other DNA
gtgggcagtgcagatgg

SEQ ID NO: 23582 - DNA, 17 bp, synthetic construct
  misc_feature 1..17: note = Oligonucleotide
  source 1..17: mol_type = other DNA
tgtgtgggcagtgcaga

SEQ ID NO: 23583 - DNA, 17 bp, synthetic construct
  misc_feature 1..17: note = Oligonucleotide
  source 1..17: mol_type = other DNA
ggctgtgtgggcagtgc

SEQ ID NO: 23584 - DNA, 17 bp, synthetic construct
  misc_feature 1..17: note = Oligonucleotide
  source 1..17: mol_type = other DNA
ctgggctgtgtgggcag

SEQ ID NO: 23585 - DNA, 17 bp, synthetic construct
  misc_feature 1..17: note = Oligonucleotide
  source 1..17: mol_type = other DNA
agcctgggctgtgtggg

SEQ ID NO: 23586 - DNA, 17 bp, synthetic construct
  misc_feature 1..17: note = Oligonucleotide
  source 1..17: mol_type = other DNA
tggagcctgggctgtgt

SEQ ID NO: 23587 - DNA, 17 bp, synthetic construct
  misc_feature 1..17: note = Oligonucleotide
  source 1..17: mol_type = other DNA
cattggagcctgggctg

SEQ ID NO: 23588 - DNA, 17 bp, synthetic construct
  misc_feature 1..17: note = Oligonucleotide
  source 1..17: mol_type = other DNA
gcccattggagcctggg

SEQ ID NO: 23589 - DNA, 17 bp, synthetic construct
  misc_feature 1..17: note = Oligonucleotide
  source 1..17: mol_type = other DNA
gcagcccattggagcct

SEQ ID NO: 23590 - DNA, 17 bp, synthetic construct
  misc_feature 1..17: note = Oligonucleotide
  source 1..17: mol_type = other DNA
gatgcagcccattggag

SEQ ID NO: 23591 - DNA, 17 bp, synthetic construct
  misc_feature 1..17: note = Oligonucleotide
  source 1..17: mol_type = other DNA
gaggatgcagcccattg

SEQ ID NO: 23592 - DNA, 17 bp, synthetic construct
  misc_feature 1..17: note = Oligonucleotide
  source 1..17: mol_type = other DNA
gcagaggatgcagccca

SEQ ID NO: 23593 - DNA, 17 bp, synthetic construct
  misc_feature 1..17: note = Oligonucleotide
  source 1..17: mol_type = other DNA
ggagcagaggatgcagc

SEQ ID NO: 23594 - DNA, 17 bp, synthetic construct
  misc_feature 1..17: note = Oligonucleotide
  source 1..17: mol_type = other DNA
cagggagcagaggatgc

SEQ ID NO: 23595 - DNA, 17 bp, synthetic construct
  misc_feature 1..17: note = Oligonucleotide
  source 1..17: mol_type = other DNA
cctcagggagcagagga

SEQ ID NO: 23596 - DNA, 17 bp, synthetic construct
  misc_feature 1..17: note = Oligonucleotide
  source 1..17: mol_type = other DNA
tgccctcagggagcaga

SEQ ID NO: 23597 - DNA, 17 bp, synthetic construct
  misc_feature 1..17: note = Oligonucleotide
  source 1..17: mol_type = other DNA
ctctgccctcagggagc

SEQ ID NO: 23598 - DNA, 17 bp, synthetic construct
  misc_feature 1..17: note = Oligonucleotide
  source 1..17: mol_type = other DNA
ggactctgccctcaggg

SEQ ID NO: 23599 - DNA, 17 bp, synthetic construct
  misc_feature 1..17: note = Oligonucleotide
  source 1..17: mol_type = other DNA
tctggactctgccctca

SEQ ID NO: 23600 - DNA, 17 bp, synthetic construct
  misc_feature 1..17: note = Oligonucleotide
  source 1..17: mol_type = other DNA
acgtctggactctgccc

SEQ ID NO: 23601 - DNA, 17 bp, synthetic construct
  misc_feature 1..17: note = Oligonucleotide
  source 1..17: mol_type = other DNA
atcacgtctggactctg

SEQ ID NO: 23602 - DNA, 17 bp, synthetic construct
  misc_feature 1..17: note = Oligonucleotide
  source 1..17: mol_type = other DNA
ggaatcacgtctggact

SEQ ID NO: 23603 - DNA, 17 bp, synthetic construct
  misc_feature 1..17: note = Oligonucleotide
  source 1..17: mol_type = other DNA
ccaggaatcacgtctgg

SEQ ID NO: 23604 - DNA, 17 bp, synthetic construct
  misc_feature 1..17: note = Oligonucleotide
  source 1..17: mol_type = other DNA
gacccaggaatcacgtc

SEQ ID NO: 23605 - DNA, 17 bp, synthetic construct
  misc_feature 1..17: note = Oligonucleotide
  source 1..17: mol_type = other DNA
ctggacccaggaatcac

SEQ ID NO: 23606 - DNA, 17 bp, synthetic construct
  misc_feature 1..17: note = Oligonucleotide
  source 1..17: mol_type = other DNA
tgcctggacccaggaat

SEQ ID NO: 23607 - DNA, 17 bp, synthetic construct
  misc_feature 1..17: note = Oligonucleotide
  source 1..17: mol_type = other DNA
gggtgcctggacccagg

SEQ ID NO: 23608 - DNA, 17 bp, synthetic construct
  misc_feature 1..17: note = Oligonucleotide
  source 1..17: mol_type = other DNA
tgtgggtgcctggaccc

SEQ ID NO: 23609 - DNA, 17 bp, synthetic construct
  misc_feature 1..17: note = Oligonucleotide
  source 1..17: mol_type = other DNA
gcctgtgggtgcctgga

SEQ ID NO: 23610 - DNA, 17 bp, synthetic construct
  misc_feature 1..17: note = Oligonucleotide
  source 1..17: mol_type = other DNA
agtgcctgtgggtgcct

SEQ ID NO: 23611 - DNA, 17 bp, synthetic construct
  misc_feature 1..17: note = Oligonucleotide
  source 1..17: mol_type = other DNA
actagtgcctgtgggtg

SEQ ID NO: 23612 - DNA, 17 bp, synthetic construct
  misc_feature 1..17: note = Oligonucleotide
  source 1..17: mol_type = other DNA
ggcactagtgcctgtgg

SEQ ID NO: 23613 - DNA, 17 bp, synthetic construct
  misc_feature 1..17: note = Oligonucleotide
  source 1..17: mol_type = other DNA
aatggcactagtgcctg

SEQ ID NO: 23614 - DNA, 17 bp, synthetic construct
  misc_feature 1..17: note = Oligonucleotide
  source 1..17: mol_type = other DNA
tccaatggcactagtgc

SEQ ID NO: 23615 - DNA, 17 bp, synthetic construct
  misc_feature 1..17: note = Oligonucleotide
  source 1..17: mol_type = other DNA
cactccaatggcactag

SEQ ID NO: 23616 - DNA, 17 bp, synthetic construct
  misc_feature 1..17: note = Oligonucleotide
  source 1..17: mol_type = other DNA
tctcactccaatggcac

SEQ ID NO: 23617 - DNA, 17 bp, synthetic construct
  misc_feature 1..17: note = Oligonucleotide
  source 1..17: mol_type = other DNA
cgctctcactccaatgg

SEQ ID NO: 23618 - DNA, 17 bp, synthetic construct
  misc_feature 1..17: note = Oligonucleotide
  source 1..17: mol_type = other DNA
ccacgctctcactccaa

SEQ ID NO: 23619 - DNA, 17 bp, synthetic construct
  misc_feature 1..17: note = Oligonucleotide
  source 1..17: mol_type = other DNA
accccacgctctcactc

SEQ ID NO: 23620 - DNA, 17 bp, synthetic construct
  misc_feature 1..17: note = Oligonucleotide
  source 1..17: mol_type = other DNA
gacaccccacgctctca

SEQ ID NO: 23621 - DNA, 17 bp, synthetic construct
  misc_feature 1..17: note = Oligonucleotide
  source 1..17: mol_type = other DNA
tgagacaccccacgctc

SEQ ID NO: 23622 - DNA, 17 bp, synthetic construct
  misc_feature 1..17: note = Oligonucleotide
  source 1..17: mol_type = other DNA
aggtgagacaccccacg

SEQ ID NO: 23623 - DNA, 17 bp, synthetic construct
  misc_feature 1..17: note = Oligonucleotide
  source 1..17: mol_type = other DNA
cagaggtgagacacccc

SEQ ID NO: 23624 - DNA, 17 bp, synthetic construct
  misc_feature 1..17: note = Oligonucleotide
  source 1..17: mol_type = other DNA
agccagaggtgagacac

SEQ ID NO: 23625 - DNA, 17 bp, synthetic construct
  misc_feature 1..17: note = Oligonucleotide
  source 1..17: mol_type = other DNA
ctaagccagaggtgaga

SEQ ID NO: 23626 - DNA, 17 bp, synthetic construct
  misc_feature 1..17: note = Oligonucleotide
  source 1..17: mol_type = other DNA
ctcctaagccagaggtg

SEQ ID NO: 23627 - DNA, 17 bp, synthetic construct
  misc_feature 1..17: note = Oligonucleotide
  source 1..17: mol_type = other DNA
ctcctcctaagccagag

SEQ ID NO: 23628 - DNA, 17 bp, synthetic construct
  misc_feature 1..17: note = Oligonucleotide
  source 1..17: mol_type = other DNA
gtcctcctcctaagcca

SEQ ID NO: 23629 - DNA, 17 bp, synthetic construct
  misc_feature 1..17: note = Oligonucleotide
  source 1..17: mol_type = other DNA
ccagtcctcctcctaag

SEQ ID NO: 23630 - DNA, 17 bp, synthetic construct
  misc_feature 1..17: note = Oligonucleotide
  source 1..17: mol_type = other DNA
cccccagtcctcctcct

SEQ ID NO: 23631 - DNA, 17 bp, synthetic construct
  misc_feature 1..17: note = Oligonucleotide
  source 1..17: mol_type = other DNA
gggcccccagtcctcct

SEQ ID NO: 23632 - DNA, 17 bp, synthetic construct
  misc_feature 1..17: note = Oligonucleotide
  source 1..17: mol_type = other DNA
tgggggcccccagtcct

SEQ ID NO: 23633 - DNA, 17 bp, synthetic construct
  misc_feature 1..17: note = Oligonucleotide
  source 1..17: mol_type = other DNA
cactgggggcccccagt

SEQ ID NO: 23634 - DNA, 17 bp, synthetic construct
  misc_feature 1..17: note = Oligonucleotide
  source 1..17: mol_type = other DNA
gggcactgggggccccc

SEQ ID NO: 23635 - DNA, 17 bp, synthetic construct
  misc_feature 1..17: note = Oligonucleotide
  source 1..17: mol_type = other DNA
ccagggcactgggggcc

SEQ ID NO: 23636 - DNA, 17 bp, synthetic construct
  misc_feature 1..17: note = Oligonucleotide
  source 1..17: mol_type = other DNA
gttccagggcactgggg

SEQ ID NO: 23637 - DNA, 17 bp, synthetic construct
  misc_feature 1..17: note = Oligonucleotide
  source 1..17: mol_type = other DNA
gaggttccagggcactg

SEQ ID NO: 23638 - DNA, 17 bp, synthetic construct
  misc_feature 1..17: note = Oligonucleotide
  source 1..17: mol_type = other DNA
atggaggttccagggca

SEQ ID NO: 23639 - DNA, 17 bp, synthetic construct
  misc_feature 1..17: note = Oligonucleotide
  source 1..17: mol_type = other DNA
aatatggaggttccagg

SEQ ID NO: 23640 - DNA, 17 bp, synthetic construct
  misc_feature 1..17: note = Oligonucleotide
  source 1..17: mol_type = other DNA
gggaatatggaggttcc

SEQ ID NO: 23641 - DNA, 17 bp, synthetic construct
  misc_feature 1..17: note = Oligonucleotide
  source 1..17: mol_type = other DNA
gaggggaatatggaggt

SEQ ID NO: 23642 - DNA, 17 bp, synthetic construct
  misc_feature 1..17: note = Oligonucleotide
  source 1..17: mol_type = other DNA
agggaggggaatatgga

SEQ ID NO: 23643 - DNA, 17 bp, synthetic construct
  misc_feature 1..17: note = Oligonucleotide
  source 1..17: mol_type = other DNA
gtcagggaggggaatat

SEQ ID NO: 23644 - DNA, 17 bp, synthetic construct
  misc_feature 1..17: note = Oligonucleotide
  source 1..17: mol_type = other DNA
ggggtcagggaggggaa

SEQ ID NO: 23645 - DNA, 17 bp, synthetic construct
  misc_feature 1..17: note = Oligonucleotide
  source 1..17: mol_type = other DNA
gtgggggtcagggaggg

SEQ ID NO: 23646 - DNA, 17 bp, synthetic construct
  misc_feature 1..17: note = Oligonucleotide
  source 1..17: mol_type = other DNA
actgtgggggtcaggga

SEQ ID NO: 23647 - DNA, 17 bp, synthetic construct
  misc_feature 1..17: note = Oligonucleotide
  source 1..17: mol_type = other DNA
atgactgtgggggtcag

SEQ ID NO: 23648 - DNA, 17 bp, synthetic construct
  misc_feature 1..17: note = Oligonucleotide
  source 1..17: mol_type = other DNA
acaatgactgtgggggt

SEQ ID NO: 23649 - DNA, 17 bp, synthetic construct
  misc_feature 1..17: note = Oligonucleotide
  source 1..17: mol_type = other DNA
caaacaatgactgtggg

SEQ ID NO: 23650 - DNA, 17 bp, synthetic construct
  misc_feature 1..17: note = Oligonucleotide
  source 1..17: mol_type = other DNA
gttcaaacaatgactgt

SEQ ID NO: 23651 - DNA, 17 bp, synthetic construct
  misc_feature 1..17: note = Oligonucleotide
  source 1..17: mol_type = other DNA
ggcgttcaaacaatgac

SEQ ID NO: 23652 - DNA, 17 bp, synthetic construct
  misc_feature 1..17: note = Oligonucleotide
  source 1..17: mol_type = other DNA
cctggcgttcaaacaat

SEQ ID NO: 23653 - DNA, 17 bp, synthetic construct
  misc_feature 1..17: note = Oligonucleotide
  source 1..17: mol_type = other DNA
ggccctggcgttcaaac

SEQ ID NO: 23654 - DNA, 17 bp, synthetic construct
  misc_feature 1..17: note = Oligonucleotide
  source 1..17: mol_type = other DNA
ggaggccctggcgttca

SEQ ID NO: 23655 - DNA, 17 bp, synthetic construct
  misc_feature 1..17: note = Oligonucleotide
  source 1..17: mol_type = other DNA
ctgggaggccctggcgt

SEQ ID NO: 23656 - DNA, 17 bp, synthetic construct
  misc_feature 1..17: note = Oligonucleotide
  source 1..17: mol_type = other DNA
ggcctgggaggccctgg

SEQ ID NO: 23657 - DNA, 17 bp, synthetic construct
  misc_feature 1..17: note = Oligonucleotide
  source 1..17: mol_type = other DNA
ctgggcctgggaggccc

SEQ ID NO: 23658 - DNA, 17 bp, synthetic construct
  misc_feature 1..17: note = Oligonucleotide
  source 1..17: mol_type = other DNA
tctctgggcctgggagg

SEQ ID NO: 23659 - DNA, 17 bp, synthetic construct
  misc_feature 1..17: note = Oligonucleotide
  source 1..17: mol_type = other DNA
gcttctctgggcctggg

SEQ ID NO: 23660 - DNA, 17 bp, synthetic construct
  misc_feature 1..17: note = Oligonucleotide
  source 1..17: mol_type = other DNA
gcagcttctctgggcct

SEQ ID NO: 23661 - DNA, 17 bp, synthetic construct
  misc_feature 1..17: note = Oligonucleotide
  source 1..17: mol_type = other DNA
ccggcagcttctctggg

SEQ ID NO: 23662 - DNA, 17 bp, synthetic construct
  misc_feature 1..17: note = Oligonucleotide
  source 1..17: mol_type = other DNA
agcccggcagcttctct

SEQ ID NO: 23663 - DNA, 17 bp, synthetic construct
  misc_feature 1..17: note = Oligonucleotide
  source 1..17: mol_type = other DNA
aggagcccggcagcttc

SEQ ID NO: 23664 - DNA, 17 bp, synthetic construct
  misc_feature 1..17: note = Oligonucleotide
  source 1..17: mol_type = other DNA
gcaaggagcccggcagc

SEQ ID NO: 23665 - DNA, 17 bp, synthetic construct
  misc_feature 1..17: note = Oligonucleotide
  source 1..17: mol_type = other DNA
tccgcaaggagcccggc

SEQ ID NO: 23666 - DNA, 17 bp, synthetic construct
  misc_feature 1..17: note = Oligonucleotide
  source 1..17: mol_type = other DNA
ccttccgcaaggagccc

SEQ ID NO: 23667 - DNA, 17 bp, synthetic construct
  misc_feature 1..17: note = Oligonucleotide
  source 1..17: mol_type = other DNA
tccccttccgcaaggag

SEQ ID NO: 23668 - DNA, 17 bp, synthetic construct
  misc_feature 1..17: note = Oligonucleotide
  source 1..17: mol_type = other DNA
gaatccccttccgcaag

SEQ ID NO: 23669 - DNA, 17 bp, synthetic construct
  misc_feature 1..17: note = Oligonucleotide
  source 1..17: mol_type = other DNA
gtggaatccccttccgc

SEQ ID NO: 23670 - DNA, 17 bp, synthetic construct
  misc_feature 1..17: note = Oligonucleotide
  source 1..17: mol_type = other DNA
tccgtggaatccccttc

SEQ ID NO: 23671 - DNA, 17 bp, synthetic construct
  misc_feature 1..17: note = Oligonucleotide
  source 1..17: mol_type = other DNA
tggtccgtggaatcccc

SEQ ID NO: 23672 - DNA, 17 bp, synthetic construct
  misc_feature 1..17: note = Oligonucleotide
  source 1..17: mol_type = other DNA
acttggtccgtggaatc

SEQ ID NO: 23673 - DNA, 17 bp, synthetic construct
  misc_feature 1..17: note = Oligonucleotide
  source 1..17: mol_type = other DNA
cagacttggtccgtgga

SEQ ID NO: 23674 - DNA, 17 bp, synthetic construct
  misc_feature 1..17: note = Oligonucleotide
  source 1..17: mol_type = other DNA
ctacagacttggtccgt

SEQ ID NO: 23675 - DNA, 17 bp, synthetic construct
  misc_feature 1..17: note = Oligonucleotide
  source 1..17: mol_type = other DNA
tacctacagacttggtc

SEQ ID NO: 23676 - DNA, 17 bp, synthetic construct
  misc_feature 1..17: note = Oligonucleotide
  source 1..17: mol_type = other DNA
ccatacctacagacttg

SEQ ID NO: 23677 - DNA, 17 bp, synthetic construct
  misc_feature 1..17: note = Oligonucleotide
  source 1..17: mol_type = other DNA
cagccatacctacagac

SEQ ID NO: 23678 - DNA, 17 bp, synthetic construct
  misc_feature 1..17: note = Oligonucleotide
  source 1..17: mol_type = other DNA
gcgcagccatacctaca

SEQ ID NO: 23679 - DNA, 17 bp, synthetic construct
  misc_feature 1..17: note = Oligonucleotide
  source 1..17: mol_type = other DNA
acagcgcagccatacct

SEQ ID NO: 23680 - DNA, 17 bp, synthetic construct
  misc_feature 1..17: note = Oligonucleotide
  source 1..17: mol_type = other DNA
cccacagcgcagccata

SEQ ID NO: 23681 - DNA, 17 bp, synthetic construct
  misc_feature 1..17: note = Oligonucleotide
  source 1..17: mol_type = other DNA
agccccacagcgcagcc

SEQ ID NO: 23682 - DNA, 17 bp, synthetic construct
  misc_feature 1..17: note = Oligonucleotide
  source 1..17: mol_type = other DNA
tgcagccccacagcgca

SEQ ID NO: 23683 - DNA, 17 bp, synthetic construct
  misc_feature 1..17: note = Oligonucleotide
  source 1..17: mol_type = other DNA
ccatgcagccccacagc

SEQ ID NO: 23684 - DNA, 17 bp, synthetic construct
  misc_feature 1..17: note = Oligonucleotide
  source 1..17: mol_type = other DNA
accccatgcagccccac

SEQ ID NO: 23685 - DNA, 17 bp, synthetic construct
  misc_feature 1..17: note = Oligonucleotide
  source 1..17: mol_type = other DNA
cccaccccatgcagccc

SEQ ID NO: 23686 - DNA, 17 bp, synthetic construct
  misc_feature 1..17: note = Oligonucleotide
  source 1..17: mol_type = other DNA
ctccccaccccatgcag

SEQ ID NO: 23687 - DNA, 17 bp, synthetic construct
  misc_feature 1..17: note = Oligonucleotide
  source 1..17: mol_type = other DNA
ttcctccccaccccatg

SEQ ID NO: 23688 - DNA, 17 bp, synthetic construct
  misc_feature 1..17: note = Oligonucleotide
  source 1..17: mol_type = other DNA
ccgttcctccccacccc

SEQ ID NO: 23689 - DNA, 17 bp, synthetic construct
  misc_feature 1..17: note = Oligonucleotide
  source 1..17: mol_type = other DNA
gccccgttcctccccac

SEQ ID NO: 23690 - DNA, 17 bp, synthetic construct
  misc_feature 1..17: note = Oligonucleotide
  source 1..17: mol_type = other DNA
ccagccccgttcctccc

SEQ ID NO: 23691 - DNA, 17 bp, synthetic construct
  misc_feature 1..17: note = Oligonucleotide
  source 1..17: mol_type = other DNA
gccccagccccgttcct

SEQ ID NO: 23692 - DNA, 17 bp, synthetic construct
  misc_feature 1..17: note = Oligonucleotide
  source 1..17: mol_type = other DNA
ccggccccagccccgtt

SEQ ID NO: 23693 - DNA, 17 bp, synthetic construct
  misc_feature 1..17: note = Oligonucleotide
  source 1..17: mol_type = other DNA
ctgccggccccagcccc

SEQ ID NO: 23694 - DNA, 17 bp, synthetic construct
  misc_feature 1..17: note = Oligonucleotide
  source 1..17: mol_type = other DNA
accctgccggccccagc

SEQ ID NO: 23695 - DNA, 17 bp, synthetic construct
  misc_feature 1..17: note = Oligonucleotide
  source 1..17: mol_type = other DNA
tccaccctgccggcccc

SEQ ID NO: 23696 - DNA, 17 bp, synthetic construct
  misc_feature 1..17: note = Oligonucleotide
  source 1..17: mol_type = other DNA
aagtccaccctgccggc

SEQ ID NO: 23697 - DNA, 17 bp, synthetic construct
  misc_feature 1..17: note = Oligonucleotide
  source 1..17: mol_type = other DNA
cccaagtccaccctgcc

SEQ ID NO: 23698 - DNA, 17 bp, synthetic construct
  misc_feature 1..17: note = Oligonucleotide
  source 1..17: mol_type = other DNA
aaacccaagtccaccct

SEQ ID NO: 23699 - DNA, 17 bp, synthetic construct
  misc_feature 1..17: note = Oligonucleotide
  source 1..17: mol_type = other DNA
ttcaaacccaagtccac

SEQ ID NO: 23700 - DNA, 17 bp, synthetic construct
  misc_feature 1..17: note = Oligonucleotide
  source 1..17: mol_type = other DNA
tccttcaaacccaagtc

SEQ ID NO: 23701 - DNA, 17 bp, synthetic construct
  misc_feature 1..17: note = Oligonucleotide
  source 1..17: mol_type = other DNA
gtgtccttcaaacccaa

SEQ ID NO: 23702 - DNA, 17 bp, synthetic construct
  misc_feature 1..17: note = Oligonucleotide
  source 1..17: mol_type = other DNA
gcagtgtccttcaaacc

SEQ ID NO: 23703 - DNA, 17 bp, synthetic construct
  misc_feature 1..17: note = Oligonucleotide
  source 1..17: mol_type = other DNA
gaggcagtgtccttcaa

SEQ ID NO: 23704 - DNA, 17 bp, synthetic construct
  misc_feature 1..17: note = Oligonucleotide
  source 1..17: mol_type = other DNA
agagaggcagtgtcctt

SEQ ID NO: 23705 - DNA, 17 bp, synthetic construct
  misc_feature 1..17: note = Oligonucleotide
  source 1..17: mol_type = other DNA
cagagagaggcagtgtc

SEQ ID NO: 23706 - DNA, 17 bp, synthetic construct
  misc_feature 1..17: note = Oligonucleotide
  source 1..17: mol_type = other DNA
gggcagagagaggcagt

SEQ ID NO: 23707 - DNA, 17 bp, synthetic construct
  misc_feature 1..17: note = Oligonucleotide
  source 1..17: mol_type = other DNA
tatgggcagagagaggc

SEQ ID NO: 23708 - DNA, 17 bp, synthetic construct
  misc_feature 1..17: note = Oligonucleotide
  source 1..17: mol_type = other DNA
agttatgggcagagaga

SEQ ID NO: 23709 - DNA, 17 bp, synthetic construct
  misc_feature 1..17: note = Oligonucleotide
  source 1..17: mol_type = other DNA
cccagttatgggcagag

SEQ ID NO: 23710 - DNA, 17 bp, synthetic construct
  misc_feature 1..17: note = Oligonucleotide
  source 1..17: mol_type = other DNA
aaccccagttatgggca

SEQ ID NO: 23711 - DNA, 17 bp, synthetic construct
  misc_feature 1..17: note = Oligonucleotide
  source 1..17: mol_type = other DNA
ggaaaccccagttatgg

SEQ ID NO: 23712 - DNA, 17 bp, synthetic construct
  misc_feature 1..17: note = Oligonucleotide
  source 1..17: mol_type = other DNA
actggaaaccccagtta

SEQ ID NO: 23713 - DNA, 17 bp, synthetic construct
  misc_feature 1..17: note = Oligonucleotide
  source 1..17: mol_type = other DNA
gaaactggaaaccccag

SEQ ID NO: 23714 - DNA, 17 bp, synthetic construct
  misc_feature 1..17: note = Oligonucleotide
  source 1..17: mol_type = other DNA
agggaaactggaaaccc

SEQ ID NO: 23715 - DNA, 17 bp, synthetic construct
  misc_feature 1..17: note = Oligonucleotide
  source 1..17: mol_type = other DNA
gagagggaaactggaaa

SEQ ID NO: 23716 - DNA, 17 bp, synthetic construct
  misc_feature 1..17: note = Oligonucleotide
  source 1..17: mol_type = other DNA
actgagagggaaactgg

SEQ ID NO: 23717 - DNA, 17 bp, synthetic construct
  misc_feature 1..17: note = Oligonucleotide
  source 1..17: mol_type = other DNA
aggactgagagggaaac

SEQ ID NO: 23718 - DNA, 17 bp, synthetic construct
  misc_feature 1..17: note = Oligonucleotide
  source 1..17: mol_type = other DNA
gacaggactgagaggga

SEQ ID NO: 23719 - DNA, 17 bp, synthetic construct
  misc_feature 1..17: note = Oligonucleotide
  source 1..17: mol_type = other DNA
agagacaggactgagag

SEQ ID NO: 23720 - DNA, 17 bp, synthetic construct
  misc_feature 1..17: note = Oligonucleotide
  source 1..17: mol_type = other DNA
ggaagagacaggactga

SEQ ID NO: 23721 - DNA, 17 bp, synthetic construct
  misc_feature 1..17: note = Oligonucleotide
  source 1..17: mol_type = other DNA
ccaggaagagacaggac

SEQ ID NO: 23722 - DNA, 17 bp, synthetic construct
  misc_feature 1..17: note = Oligonucleotide
  source 1..17: mol_type = other DNA
gggccaggaagagacag

SEQ ID NO: 23723 - DNA, 17 bp, synthetic construct
  misc_feature 1..17: note = Oligonucleotide
  source 1..17: mol_type = other DNA
ctggggccaggaagaga

SEQ ID NO: 23724 - DNA, 17 bp, synthetic construct
  misc_feature 1..17: note = Oligonucleotide
  source 1..17: mol_type = other DNA
tagctggggccaggaag

SEQ ID NO: 23725 - DNA, 17 bp, synthetic construct
  misc_feature 1..17: note = Oligonucleotide
  source 1..17: mol_type = other DNA
ctttagctggggccagg

SEQ ID NO: 23726 - DNA, 17 bp, synthetic construct
  misc_feature 1..17: note = Oligonucleotide
  source 1..17: mol_type = other DNA
atcctttagctggggcc

SEQ ID NO: 23727 - DNA, 17 bp, synthetic construct
  misc_feature 1..17: note = Oligonucleotide
  source 1..17: mol_type = other DNA
gagatcctttagctggg

SEQ ID NO: 23728 - DNA, 17 bp, synthetic construct
  misc_feature 1..17: note = Oligonucleotide
  source 1..17: mol_type = other DNA
tatgagatcctttagct

SEQ ID NO: 23729 - DNA, 17 bp, synthetic construct
  misc_feature 1..17: note = Oligonucleotide
  source 1..17: mol_type = other DNA
acgtatgagatccttta

SEQ ID NO: 23730 - DNA, 17 bp, synthetic construct
  misc_feature 1..17: note = Oligonucleotide
  source 1..17: mol_type = other DNA
tcaacgtatgagatcct

SEQ ID NO: 23731 - DNA, 17 bp, synthetic construct
  misc_feature 1..17: note = Oligonucleotide
  source 1..17: mol_type = other DNA
ccatcaacgtatgagat

SEQ ID NO: 23732 - DNA, 17 bp, synthetic construct
  misc_feature 1..17: note = Oligonucleotide
  source 1..17: mol_type = other DNA
tgtccatcaacgtatga

SEQ ID NO: 23733 - DNA, 17 bp, synthetic construct
  misc_feature 1..17: note = Oligonucleotide
  source 1..17: mol_type = other DNA
acatgtccatcaacgta

SEQ ID NO: 23734 - DNA, 17 bp, synthetic construct
  misc_feature 1..17: note = Oligonucleotide
  source 1..17: mol_type = other DNA
cccacatgtccatcaac

SEQ ID NO: 23735 - DNA, 17 bp, synthetic construct
  misc_feature 1..17: note = Oligonucleotide
  source 1..17: mol_type = other DNA
atccccacatgtccatc

SEQ ID NO: 23736 - DNA, 17 bp, synthetic construct
  misc_feature 1..17: note = Oligonucleotide
  source 1..17: mol_type = other DNA
ctaatccccacatgtcc

SEQ ID NO: 23737 - DNA, 17 bp, synthetic construct
  misc_feature 1..17: note = Oligonucleotide
  source 1..17: mol_type = other DNA
ggcctaatccccacatg

SEQ ID NO: 23738 - DNA, 17 bp, synthetic construct
  misc_feature 1..17: note = Oligonucleotide
  source 1..17: mol_type = other DNA
gaaggcctaatccccac

SEQ ID NO: 23739 - DNA, 17 bp, synthetic construct
  misc_feature 1..17: note = Oligonucleotide
  source 1..17: mol_type = other DNA
ggggaaggcctaatccc

SEQ ID NO: 23740 - DNA, 17 bp, synthetic construct
  misc_feature 1..17: note = Oligonucleotide
  source 1..17: mol_type = other DNA
gttggggaaggcctaat

SEQ ID NO: 23741 - DNA, 17 bp, synthetic construct
  misc_feature 1..17: note = Oligonucleotide
  source 1..17: mol_type = other DNA
tgggttggggaaggcct

SEQ ID NO: 23742 - DNA, 17 bp, synthetic construct
  misc_feature 1..17: note = Oligonucleotide
  source 1..17: mol_type = other DNA
ctctgggttggggaagg

SEQ ID NO: 23743 - DNA, 17 bp, synthetic construct
  misc_feature 1..17: note = Oligonucleotide
  source 1..17: mol_type = other DNA
aagctctgggttgggga

SEQ ID NO: 23744 - DNA, 17 bp, synthetic construct
  misc_feature 1..17: note = Oligonucleotide
  source 1..17: mol_type = other DNA
ggaaagctctgggttgg

SEQ ID NO: 23745 - DNA, 17 bp, synthetic construct
  misc_feature 1..17: note = Oligonucleotide
  source 1..17: mol_type = other DNA
gggggaaagctctgggt

SEQ ID NO: 23746 - DNA, 17 bp, synthetic construct
  misc_feature 1..17: note = Oligonucleotide
  source 1..17: mol_type = other DNA
gccgggggaaagctctg

SEQ ID NO: 23747 - DNA, 17 bp, synthetic construct
  misc_feature 1..17: note = Oligonucleotide
  source 1..17: mol_type = other DNA
gctgccgggggaaagct

SEQ ID NO: 23748 - DNA, 17 bp, synthetic construct
  misc_feature 1..17: note = Oligonucleotide
  source 1..17: mol_type = other DNA
tcggctgccgggggaaa

SEQ ID NO: 23749 - DNA, 17 bp, synthetic construct
  misc_feature 1..17: note = Oligonucleotide
  source 1..17: mol_type = other DNA
gtgtcggctgccggggg

SEQ ID NO: 23750 - DNA, 17 bp, synthetic construct
  misc_feature 1..17: note = Oligonucleotide
  source 1..17: mol_type = other DNA
ggagtgtcggctgccgg

SEQ ID NO: 23751 - DNA, 17 bp, synthetic construct
  misc_feature 1..17: note = Oligonucleotide
  source 1..17: mol_type = other DNA
cagggagtgtcggctgc

SEQ ID NO: 23752 - DNA, 17 bp, synthetic construct
  misc_feature 1..17: note = Oligonucleotide
  source 1..17: mol_type = other DNA
ggacagggagtgtcggc

SEQ ID NO: 23753 - DNA, 17 bp, synthetic construct
  misc_feature 1..17: note = Oligonucleotide
  source 1..17: mol_type = other DNA
actggacagggagtgtc

SEQ ID NO: 23754 - DNA, 17 bp, synthetic construct
  misc_feature 1..17: note = Oligonucleotide
  source 1..17: mol_type = other DNA
cccactggacagggagt

SEQ ID NO: 23755 - DNA, 17 bp, synthetic construct
  misc_feature 1..17: note = Oligonucleotide
  source 1..17: mol_type = other DNA
gtgcccactggacaggg

SEQ ID NO: 23756 - DNA, 17 bp, synthetic construct
  misc_feature 1..17: note = Oligonucleotide
  source 1..17: mol_type = other DNA
gcggtgcccactggaca

SEQ ID NO: 23757 - DNA, 17 bp, synthetic construct
  misc_feature 1..17: note = Oligonucleotide
  source 1..17: mol_type = other DNA
ggggcggtgcccactgg

SEQ ID NO: 23758 - DNA, 17 bp, synthetic construct
  misc_feature 1..17: note = Oligonucleotide
  source 1..17: mol_type = other DNA
tggggggcggtgcccac

SEQ ID NO: 23759 - DNA, 17 bp, synthetic construct
  misc_feature 1..17: note = Oligonucleotide
  source 1..17: mol_type = other DNA
cgatggggggcggtgcc

SEQ ID NO: 23760 - DNA, 17 bp, synthetic construct
  misc_feature 1..17: note = Oligonucleotide
  source 1..17: mol_type = other DNA
aggcgatggggggcggt

SEQ ID NO: 23761 - DNA, 17 bp, synthetic construct
  misc_feature 1..17: note = Oligonucleotide
  source 1..17: mol_type = other DNA
atgaggcgatggggggc

SEQ ID NO: 23762 - DNA, 17 bp, synthetic construct
  misc_feature 1..17: note = Oligonucleotide
  source 1..17: mol_type = other DNA
gggatgaggcgatgggg

SEQ ID NO: 23763 - DNA, 17 bp, synthetic construct
  misc_feature 1..17: note = Oligonucleotide
  source 1..17: mol_type = other DNA
ggagggatgaggcgatg

SEQ ID NO: 23764 - DNA, 17 bp, synthetic construct
  misc_feature 1..17: note = Oligonucleotide
  source 1..17: mol_type = other DNA
atgggagggatgaggcg

SEQ ID NO: 23765 - DNA, 17 bp, synthetic construct
  misc_feature 1..17: note = Oligonucleotide
  source 1..17: mol_type = other DNA
cccatgggagggatgag

SEQ ID NO: 23766 - DNA, 17 bp, synthetic construct
  misc_feature 1..17: note = Oligonucleotide
  source 1..17: mol_type = other DNA
ctgcccatgggagggat

SEQ ID NO: 23767 - DNA, 17 bp, synthetic construct
  misc_feature 1..17: note = Oligonucleotide
  source 1..17: mol_type = other DNA
agactgcccatgggagg

SEQ ID NO: 23768 - DNA, 17 bp, synthetic construct
  misc_feature 1..17: note = Oligonucleotide
  source 1..17: mol_type = other DNA
atgagactgcccatggg

SEQ ID NO: 23769 - DNA, 17 bp, synthetic construct
  misc_feature 1..17: note = Oligonucleotide
  source 1..17: mol_type = other DNA
gggatgagactgcccat

SEQ ID NO: 23770 - DNA, 17 bp, synthetic construct
  misc_feature 1..17: note = Oligonucleotide
  source 1..17: mol_type = other DNA
acagggatgagactgcc

SEQ ID NO: 23771 - DNA, 17 bp, synthetic construct
  misc_feature 1..17: note = Oligonucleotide
  source 1..17: mol_type = other DNA
gggacagggatgagact

SEQ ID NO: 23772 - DNA, 17 bp, synthetic construct
  misc_feature 1..17: note = Oligonucleotide
  source 1..17: mol_type = other DNA
ctggggacagggatgag

SEQ ID NO: 23773 - DNA, 17 bp, synthetic construct
  misc_feature 1..17: note = Oligonucleotide
  source 1..17: mol_type = other DNA
cagctggggacagggat

SEQ ID NO: 23774 - DNA, 17 bp, synthetic construct
  misc_feature 1..17: note = Oligonucleotide
  source 1..17: mol_type = other DNA
tggcagctggggacagg

SEQ ID NO: 23775 - DNA, 17 bp, synthetic construct
  misc_feature 1..17: note = Oligonucleotide
  source 1..17: mol_type = other DNA
gagtggcagctggggac

SEQ ID NO: 23776 - DNA, 17 bp, synthetic construct
  misc_feature 1..17: note = Oligonucleotide
  source 1..17: mol_type = other DNA
agggagtggcagctggg

SEQ ID NO: 23777 - DNA, 17 bp, synthetic construct
  misc_feature 1..17: note = Oligonucleotide
  source 1..17: mol_type = other DNA
gacagggagtggcagct

SEQ ID NO: 23778 - DNA, 17 bp, synthetic construct
  misc_feature 1..17: note = Oligonucleotide
  source 1..17: mol_type = other DNA
gtggacagggagtggca

SEQ ID NO: 23779 - DNA, 17 bp, synthetic construct
  misc_feature 1..17: note = Oligonucleotide
  source 1..17: mol_type = other DNA
ccagtggacagggagtg

SEQ ID NO: 23780 - DNA, 17 bp, synthetic construct
  misc_feature 1..17: note = Oligonucleotide
  source 1..17: mol_type = other DNA
tgcccagtggacaggga

SEQ ID NO: 23781 - DNA, 17 bp, synthetic construct
  misc_feature 1..17: note = Oligonucleotide
  source 1..17: mol_type = other DNA
gggtgcccagtggacag

SEQ ID NO: 23782 - DNA, 17 bp, synthetic construct
  misc_feature 1..17: note = Oligonucleotide
  source 1..17: mol_type = other DNA
tgggggtgcccagtgga

SEQ ID NO: 23783 - DNA, 17 bp, synthetic construct
  misc_feature 1..17: note = Oligonucleotide
  source 1..17: mol_type = other DNA
aggtgggggtgcccagt

SEQ ID NO: 23784 - DNA, 17 bp, synthetic construct
  misc_feature 1..17: note = Oligonucleotide
  source 1..17: mol_type = other DNA
gggaggtgggggtgccc

SEQ ID NO: 23785 - DNA, 17 bp, synthetic construct
  misc_feature 1..17: note = Oligonucleotide
  source 1..17: mol_type = other DNA
atggggaggtgggggtg

SEQ ID NO: 23786 - DNA, 17 bp, synthetic construct
  misc_feature 1..17: note = Oligonucleotide
  source 1..17: mol_type = other DNA
gtgatggggaggtgggg

SEQ ID NO: 23787 - DNA, 17 bp, synthetic construct
  misc_feature 1..17: note = Oligonucleotide
  source 1..17: mol_type = other DNA
gaggtgatggggaggtg

SEQ ID NO: 23788 - DNA, 17 bp, synthetic construct
  misc_feature 1..17: note = Oligonucleotide
  source 1..17: mol_type = other DNA
tgagaggtgatggggag

SEQ ID NO: 23789 - DNA, 17 bp, synthetic construct
  misc_feature 1..17: note = Oligonucleotide
  source 1..17: mol_type = other DNA
ggatgagaggtgatggg

SEQ ID NO: 23790 - DNA, 17 bp, synthetic construct
  misc_feature 1..17: note = Oligonucleotide
  source 1..17: mol_type = other DNA
gagggatgagaggtgat

SEQ ID NO: 23791 - DNA, 17 bp, synthetic construct
  misc_feature 1..17: note = Oligonucleotide
  source 1..17: mol_type = other DNA
tgggagggatgagaggt

SEQ ID NO: 23792 - DNA, 17 bp, synthetic construct
  misc_feature 1..17: note = Oligonucleotide
  source 1..17: mol_type = other DNA
ccatgggagggatgaga

SEQ ID NO: 23793 - DNA, 17 bp, synthetic construct
  misc_feature 1..17: note = Oligonucleotide
  source 1..17: mol_type = other DNA
tgcccatgggagggatg

SEQ ID NO: 23794 - DNA, 17 bp, synthetic construct
  misc_feature 1..17: note = Oligonucleotide
  source 1..17: mol_type = other DNA
ggctgcccatgggaggg

SEQ ID NO: 23795 - DNA, 17 bp, synthetic construct
  misc_feature 1..17: note = Oligonucleotide
  source 1..17: mol_type = other DNA
tgaggctgcccatggga

SEQ ID NO: 23796 - DNA, 17 bp, synthetic construct
  misc_feature 1..17: note = Oligonucleotide
  source 1..17: mol_type = other DNA
ggatgaggctgcccatg

SEQ ID NO: 23797 - DNA, 17 bp, synthetic construct
  misc_feature 1..17: note = Oligonucleotide
  source 1..17: mol_type = other DNA
cagggatgaggctgccc

SEQ ID NO: 23798 - DNA, 17 bp, synthetic construct
  misc_feature 1..17: note = Oligonucleotide
  source 1..17: mol_type = other DNA
ggacagggatgaggctg

SEQ ID NO: 23799 - DNA, 17 bp, synthetic construct
  misc_feature 1..17: note = Oligonucleotide
  source 1..17: mol_type = other DNA
tggggacagggatgagg

SEQ ID NO: 23800 - DNA, 17 bp, synthetic construct
  misc_feature 1..17: note = Oligonucleotide
  source 1..17: mol_type = other DNA
agctggggacagggatg

SEQ ID NO: 23801 - DNA, 17 bp, synthetic construct
  misc_feature 1..17: note = Oligonucleotide
  source 1..17: mol_type = other DNA
ggcagctggggacaggg

SEQ ID NO: 23802 - DNA, 17 bp, synthetic construct
  misc_feature 1..17: note = Oligonucleotide
  source 1..17: mol_type = other DNA
agtggcagctggggaca

SEQ ID NO: 23803 - DNA, 17 bp, synthetic construct
  misc_feature 1..17: note = Oligonucleotide
  source 1..17: mol_type = other DNA
gggagtggcagctgggg

SEQ ID NO: 23804 - DNA, 17 bp, synthetic construct
  misc_feature 1..17: note = Oligonucleotide
  source 1..17: mol_type = other DNA
acagggagtggcagctg

SEQ ID NO: 23805 - DNA, 17 bp, synthetic construct
  misc_feature 1..17: note = Oligonucleotide
  source 1..17: mol_type = other DNA
tggacagggagtggcag

SEQ ID NO: 23806 - DNA, 17 bp, synthetic construct
  misc_feature 1..17: note = Oligonucleotide
  source 1..17: mol_type = other DNA
cagtggacagggagtgg

SEQ ID NO: 23807 - DNA, 17 bp, synthetic construct
  misc_feature 1..17: note = Oligonucleotide
  source 1..17: mol_type = other DNA
gcccagtggacagggag

SEQ ID NO: 23808 - DNA, 17 bp, synthetic construct
  misc_feature 1..17: note = Oligonucleotide
  source 1..17: mol_type = other DNA
ggtgcccagtggacagg

SEQ ID NO: 23809 - DNA, 17 bp, synthetic construct
  misc_feature 1..17: note = Oligonucleotide
  source 1..17: mol_type = other DNA
gggggtgcccagtggac

SEQ ID NO: 23810 - DNA, 17 bp, synthetic construct
  misc_feature 1..17: note = Oligonucleotide
  source 1..17: mol_type = other DNA
ggtgggggtgcccagtg

SEQ ID NO: 23811 - DNA, 17 bp, synthetic construct
  misc_feature 1..17: note = Oligonucleotide
  source 1..17: mol_type = other DNA
ggaggtgggggtgccca

SEQ ID NO: 23812 - DNA, 17 bp, synthetic construct
  misc_feature 1..17: note = Oligonucleotide
  source 1..17: mol_type = other DNA
tggggaggtgggggtgc

SEQ ID NO: 23813 - DNA, 17 bp, synthetic construct
  misc_feature 1..17: note = Oligonucleotide
  source 1..17: mol_type = other DNA
tgatggggaggtggggg

SEQ ID NO: 23814 - DNA, 17 bp, synthetic construct
  misc_feature 1..17: note = Oligonucleotide
  source 1..17: mol_type = other DNA
aggtgatggggaggtgg

SEQ ID NO: 23815 - DNA, 17 bp, synthetic construct
  misc_feature 1..17: note = Oligonucleotide
  source 1..17: mol_type = other DNA
gagaggtgatggggagg

SEQ ID NO: 23816 - DNA, 17 bp, synthetic construct
  misc_feature 1..17: note = Oligonucleotide
  source 1..17: mol_type = other DNA
gatgagaggtgatgggg

SEQ ID NO: 23817 - DNA, 17 bp, synthetic construct
  misc_feature 1..17: note = Oligonucleotide
  source 1..17: mol_type = other DNA
aaggatgagaggtgatg

SEQ ID NO: 23818 - DNA, 17 bp, synthetic construct
  misc_feature 1..17: note = Oligonucleotide
  source 1..17: mol_type = other DNA
gggaaggatgagaggtg

SEQ ID NO: 23819 - DNA, 17 bp, synthetic construct
  misc_feature 1..17: note = Oligonucleotide
  source 1..17: mol_type = other DNA
catgggaaggatgagag

SEQ ID NO: 23820 - DNA, 17 bp, synthetic construct
  misc_feature 1..17: note = Oligonucleotide
  source 1..17: mol_type = other DNA
gcccatgggaaggatga

SEQ ID NO: 23821 - DNA, 17 bp, synthetic construct
  misc_feature 1..17: note = Oligonucleotide
  source 1..17: mol_type = other DNA
gctgcccatgggaagga

SEQ ID NO: 23822 - DNA, 17 bp, synthetic construct
  misc_feature 1..17: note = Oligonucleotide
  source 1..17: mol_type = other DNA
gaggctgcccatgggaa

SEQ ID NO: 23823 - DNA, 17 bp, synthetic construct
  misc_feature 1..17: note = Oligonucleotide
  source 1..17: mol_type = other DNA
gatgaggctgcccatgg

SEQ ID NO: 23824 - DNA, 17 bp, synthetic construct
  misc_feature 1..17: note = Oligonucleotide
  source 1..17: mol_type = other DNA
agggatgaggctgccca

SEQ ID NO: 23825 - DNA, 17 bp, synthetic construct
  misc_feature 1..17: note = Oligonucleotide
  source 1..17: mol_type = other DNA
gacagggatgaggctgc

SEQ ID NO: 23826 - DNA, 17 bp, synthetic construct
  misc_feature 1..17: note = Oligonucleotide
  source 1..17: mol_type = other DNA
ggggacagggatgaggc

SEQ ID NO: 23827 - DNA, 17 bp, synthetic construct
  misc_feature 1..17: note = Oligonucleotide
  source 1..17: mol_type = other DNA
gctggggacagggatga

SEQ ID NO: 23828 - DNA, 17 bp, synthetic construct
  misc_feature 1..17: note = Oligonucleotide
  source 1..17: mol_type = other DNA
tgagctggggacaggga

SEQ ID NO: 23829 - DNA, 17 bp, synthetic construct
  misc_feature 1..17: note = Oligonucleotide
  source 1..17: mol_type = other DNA
agctgagctggggacag

SEQ ID NO: 23830 - DNA, 17 bp, synthetic construct
  misc_feature 1..17: note = Oligonucleotide
  source 1..17: mol_type = other DNA
ggcagctgagctgggga

SEQ ID NO: 23831 - DNA, 17 bp, synthetic construct
  misc_feature 1..17: note = Oligonucleotide
  source 1..17: mol_type = other DNA
ggaggcagctgagctgg

SEQ ID NO: 23832 - DNA, 17 bp, synthetic construct
  misc_feature 1..17: note = Oligonucleotide
  source 1..17: mol_type = other DNA
gatggaggcagctgagc

SEQ ID NO: 23833 - DNA, 17 bp, synthetic construct
  misc_feature 1..17: note = Oligonucleotide
  source 1..17: mol_type = other DNA
cgcgatggaggcagctg

SEQ ID NO: 23834 - DNA, 17 bp, synthetic construct
  misc_feature 1..17: note = Oligonucleotide
  source 1..17: mol_type = other DNA
aaccgcgatggaggcag

SEQ ID NO: 23835 - DNA, 17 bp, synthetic construct
  misc_feature 1..17: note = Oligonucleotide
  source 1..17: mol_type = other DNA
agcaaccgcgatggagg

SEQ ID NO: 23836 - DNA, 17 bp, synthetic construct
  misc_feature 1..17: note = Oligonucleotide
  source 1..17: mol_type = other DNA
gggagcaaccgcgatgg

SEQ ID NO: 23837 - DNA, 17 bp, synthetic construct
  misc_feature 1..17: note = Oligonucleotide
  source 1..17: mol_type = other DNA
caagggagcaaccgcga

SEQ ID NO: 23838 - DNA, 17 bp, synthetic construct
  misc_feature 1..17: note = Oligonucleotide
  source 1..17: mol_type = other DNA
ctgcaagggagcaaccg

SEQ ID NO: 23839 - DNA, 17 bp, synthetic construct
  misc_feature 1..17: note = Oligonucleotide
  source 1..17: mol_type = other DNA
gggctgcaagggagcaa

SEQ ID NO: 23840 - DNA, 17 bp, synthetic construct
  misc_feature 1..17: note = Oligonucleotide
  source 1..17: mol_type = other DNA
cttgggctgcaagggag

SEQ ID NO: 23841 - DNA, 17 bp, synthetic construct
  misc_feature 1..17: note = Oligonucleotide
  source 1..17: mol_type = other DNA
gcacttgggctgcaagg

SEQ ID NO: 23842 - DNA, 17 bp, synthetic construct
  misc_feature 1..17: note = Oligonucleotide
  source 1..17: mol_type = other DNA
catgcacttgggctgca

SEQ ID NO: 23843 - DNA, 17 bp, synthetic construct
  misc_feature 1..17: note = Oligonucleotide
  source 1..17: mol_type = other DNA
tcacatgcacttgggct

SEQ ID NO: 23844 - DNA, 17 bp, synthetic construct
  misc_feature 1..17: note = Oligonucleotide
  source 1..17: mol_type = other DNA
acttcacatgcacttgg

SEQ ID NO: 23845 - DNA, 17 bp, synthetic construct
  misc_feature 1..17: note = Oligonucleotide
  source 1..17: mol_type = other DNA
gaaacttcacatgcact

SEQ ID NO: 23846 - DNA, 17 bp, synthetic construct
  misc_feature 1..17: note = Oligonucleotide
  source 1..17: mol_type = other DNA
tcagaaacttcacatgc

SEQ ID NO: 23847 - DNA, 17 bp, synthetic construct
  misc_feature 1..17: note = Oligonucleotide
  source 1..17: mol_type = other DNA
gggtcagaaacttcaca

SEQ ID NO: 23848 - DNA, 17 bp, synthetic construct
  misc_feature 1..17: note = Oligonucleotide
  source 1..17: mol_type = other DNA
tgagggtcagaaacttc

SEQ ID NO: 23849 - DNA, 17 bp, synthetic construct
  misc_feature 1..17: note = Oligonucleotide
  source 1..17: mol_type = other DNA
gtttgagggtcagaaac

SEQ ID NO: 23850 - DNA, 17 bp, synthetic construct
  misc_feature 1..17: note = Oligonucleotide
  source 1..17: mol_type = other DNA
ggggtttgagggtcaga

SEQ ID NO: 23851 - DNA, 17 bp, synthetic construct
  misc_feature 1..17: note = Oligonucleotide
  source 1..17: mol_type = other DNA
cagggggtttgagggtc

SEQ ID NO: 23852 - DNA, 17 bp, synthetic construct
  misc_feature 1..17: note = Oligonucleotide
  source 1..17: mol_type = other DNA
gttcagggggtttgagg

SEQ ID NO: 23853 - DNA, 17 bp, synthetic construct
  misc_feature 1..17: note = Oligonucleotide
  source 1..17: mol_type = other DNA
caagttcagggggtttg

SEQ ID NO: 23854 - DNA, 17 bp, synthetic construct
  misc_feature 1..17: note = Oligonucleotide
  source 1..17: mol_type = other DNA
aggcaagttcagggggt

SEQ ID NO: 23855 - DNA, 17 bp, synthetic construct
  misc_feature 1..17: note = Oligonucleotide
  source 1..17: mol_type = other DNA
gagaggcaagttcaggg

SEQ ID NO: 23856 - DNA, 17 bp, synthetic construct
  misc_feature 1..17: note = Oligonucleotide
  source 1..17: mol_type = other DNA
ggggagaggcaagttca

SEQ ID NO: 23857 - DNA, 17 bp, synthetic construct
  misc_feature 1..17: note = Oligonucleotide
  source 1..17: mol_type = other DNA
gtaggggagaggcaagt

SEQ ID NO: 23858 - DNA, 17 bp, synthetic construct
  misc_feature 1..17: note = Oligonucleotide
  source 1..17: mol_type = other DNA
gaagtaggggagaggca

SEQ ID NO: 23859 - DNA, 17 bp, synthetic construct
  misc_feature 1..17: note = Oligonucleotide
  source 1..17: mol_type = other DNA
ggagaagtaggggagag

SEQ ID NO: 23860 - DNA, 17 bp, synthetic construct
  misc_feature 1..17: note = Oligonucleotide
  source 1..17: mol_type = other DNA
catggagaagtagggga

SEQ ID NO: 23861 - DNA, 17 bp, synthetic construct
  misc_feature 1..17: note = Oligonucleotide
  source 1..17: mol_type = other DNA
atacatggagaagtagg

SEQ ID NO: 23862 - DNA, 17 bp, synthetic construct
  misc_feature 1..17: note = Oligonucleotide
  source 1..17: mol_type = other DNA
gcaatacatggagaagt

SEQ ID NO: 23863 - DNA, 17 bp, synthetic construct
  misc_feature 1..17: note = Oligonucleotide
  source 1..17: mol_type = other DNA
acagcaatacatggaga

SEQ ID NO: 23864 - DNA, 17 bp, synthetic construct
  misc_feature 1..17: note = Oligonucleotide
  source 1..17: mol_type = other DNA
gagacagcaatacatgg

SEQ ID NO: 23865 - DNA, 17 bp, synthetic construct
  misc_feature 1..17: note = Oligonucleotide
  source 1..17: mol_type = other DNA
ggggagacagcaataca

SEQ ID NO: 23866 - DNA, 17 bp, synthetic construct
  misc_feature 1..17: note = Oligonucleotide
  source 1..17: mol_type = other DNA
aggggggagacagcaat

SEQ ID NO: 23867 - DNA, 17 bp, synthetic construct
  misc_feature 1..17: note = Oligonucleotide
  source 1..17: mol_type = other DNA
tgaaggggggagacagc

SEQ ID NO: 23868 - DNA, 17 bp, synthetic construct
  misc_feature 1..17: note = Oligonucleotide
  source 1..17: mol_type = other DNA
ctgtgaaggggggagac

SEQ ID NO: 23869 - DNA, 17 bp, synthetic construct
  misc_feature 1..17: note = Oligonucleotide
  source 1..17: mol_type = other DNA
tggctgtgaagggggga

SEQ ID NO: 23870 - DNA, 17 bp, synthetic construct
  misc_feature 1..17: note = Oligonucleotide
  source 1..17: mol_type = other DNA
aactggctgtgaagggg

SEQ ID NO: 23871 - DNA, 17 bp, synthetic construct
  misc_feature 1..17: note = Oligonucleotide
  source 1..17: mol_type = other DNA
gaaaactggctgtgaag

SEQ ID NO: 23872 - DNA, 17 bp, synthetic construct
  misc_feature 1..17: note = Oligonucleotide
  source 1..17: mol_type = other DNA
ggggaaaactggctgtg

SEQ ID NO: 23873 - DNA, 17 bp, synthetic construct
  misc_feature 1..17: note = Oligonucleotide
  source 1..17: mol_type = other DNA
tttggggaaaactggct

SEQ ID NO: 23874 - DNA, 17 bp, synthetic construct
  misc_feature 1..17: note = Oligonucleotide
  source 1..17: mol_type = other DNA
ctttttggggaaaactg

SEQ ID NO: 23875 - DNA, 17 bp, synthetic construct
  misc_feature 1..17: note = Oligonucleotide
  source 1..17: mol_type = other DNA
tgactttttggggaaaa

SEQ ID NO: 23876 - DNA, 17 bp, synthetic construct
  misc_feature 1..17: note = Oligonucleotide
  source 1..17: mol_type = other DNA
aggtgactttttgggga

SEQ ID NO: 23877 - DNA, 17 bp, synthetic construct
  misc_feature 1..17: note = Oligonucleotide
  source 1..17: mol_type = other DNA
tagaggtgactttttgg

SEQ ID NO: 23878 - DNA, 17 bp, synthetic construct
  misc_feature 1..17: note = Oligonucleotide
  source 1..17: mol_type = other DNA
cagtagaggtgactttt

SEQ ID NO: 23879 - DNA, 17 bp, synthetic construct
  misc_feature 1..17: note = Oligonucleotide
  source 1..17: mol_type = other DNA
ggacagtagaggtgact

SEQ ID NO: 23880 - DNA, 17 bp, synthetic construct
  misc_feature 1..17: note = Oligonucleotide
  source 1..17: mol_type = other DNA
gatggacagtagaggtg

SEQ ID NO: 23881 - DNA, 17 bp, synthetic construct
  misc_feature 1..17: note = Oligonucleotide
  source 1..17: mol_type = other DNA
caagatggacagtagag

SEQ ID NO: 23882 - DNA, 17 bp, synthetic construct
  misc_feature 1..17: note = Oligonucleotide
  source 1..17: mol_type = other DNA
agacaagatggacagta

SEQ ID NO: 23883 - DNA, 17 bp, synthetic construct
  misc_feature 1..17: note = Oligonucleotide
  source 1..17: mol_type = other DNA
gggagacaagatggaca

SEQ ID NO: 23884 - DNA, 17 bp, synthetic construct
  misc_feature 1..17: note = Oligonucleotide
  source 1..17: mol_type = other DNA
gacgggagacaagatgg

SEQ ID NO: 23885 - DNA, 17 bp, synthetic construct
  misc_feature 1..17: note = Oligonucleotide
  source 1..17: mol_type = other DNA
ggggacgggagacaaga

SEQ ID NO: 23886 - DNA, 17 bp, synthetic construct
  misc_feature 1..17: note = Oligonucleotide
  source 1..17: mol_type = other DNA
gtgggggacgggagaca

SEQ ID NO: 23887 - DNA, 17 bp, synthetic construct
  misc_feature 1..17: note = Oligonucleotide
  source 1..17: mol_type = other DNA
ccggtgggggacgggag

SEQ ID NO: 23888 - DNA, 17 bp, synthetic construct
  misc_feature 1..17: note = Oligonucleotide
  source 1..17: mol_type = other DNA
gagccggtgggggacgg

SEQ ID NO: 23889 - DNA, 17 bp, synthetic construct
  misc_feature 1..17: note = Oligonucleotide
  source 1..17: mol_type = other DNA
gaggagccggtggggga

SEQ ID NO: 23890 - DNA, 17 bp, synthetic construct
  misc_feature 1..17: note = Oligonucleotide
  source 1..17: mol_type = other DNA
gctgaggagccggtggg

SEQ ID NO: 23891 - DNA, 17 bp, synthetic construct
  misc_feature 1..17: note = Oligonucleotide
  source 1..17: mol_type = other DNA
caggctgaggagccggt

SEQ ID NO: 23892 - DNA, 17 bp, synthetic construct
  misc_feature 1..17: note = Oligonucleotide
  source 1..17: mol_type = other DNA
ccgcaggctgaggagcc

SEQ ID NO: 23893 - DNA, 17 bp, synthetic construct
  misc_feature 1..17: note = Oligonucleotide
  source 1..17: mol_type = other DNA
ctgccgcaggctgagga

SEQ ID NO: 23894 - DNA, 17 bp, synthetic construct
  misc_feature 1..17: note = Oligonucleotide
  source 1..17: mol_type = other DNA
agtctgccgcaggctga

SEQ ID NO: 23895 - DNA, 17 bp, synthetic construct
  misc_feature 1..17: note = Oligonucleotide
  source 1..17: mol_type = other DNA
ggaagtctgccgcaggc

SEQ ID NO: 23896 - DNA, 17 bp, synthetic construct
  misc_feature 1..17: note = Oligonucleotide
  source 1..17: mol_type = other DNA
agaggaagtctgccgca

SEQ ID NO: 23897 - DNA, 17 bp, synthetic construct
  misc_feature 1..17: note = Oligonucleotide
  source 1..17: mol_type = other DNA
gagagaggaagtctgcc

SEQ ID NO: 23898 - DNA, 17 bp, synthetic construct
  misc_feature 1..17: note = Oligonucleotide
  source 1..17: mol_type = other DNA
atggagagaggaagtct

SEQ ID NO: 23899 - DNA, 17 bp, synthetic construct
  misc_feature 1..17: note = Oligonucleotide
  source 1..17: mol_type = other DNA
ggtatggagagaggaag

SEQ ID NO: 23900 - DNA, 17 bp, synthetic construct
  misc_feature 1..17: note = Oligonucleotide
  source 1..17: mol_type = other DNA
ttgggtatggagagagg

SEQ ID NO: 23901 - DNA, 17 bp, synthetic construct
  misc_feature 1..17: note = Oligonucleotide
  source 1..17: mol_type = other DNA
aatttgggtatggagag

SEQ ID NO: 23902 - DNA, 17 bp, synthetic construct
  misc_feature 1..17: note = Oligonucleotide
  source 1..17: mol_type = other DNA
ttcaatttgggtatgga

SEQ ID NO: 23903 - DNA, 17 bp, synthetic construct
  misc_feature 1..17: note = Oligonucleotide
  source 1..17: mol_type = other DNA
agtttcaatttgggtat

SEQ ID NO: 23904 - DNA, 17 bp, synthetic construct
  misc_feature 1..17: note = Oligonucleotide
  source 1..17: mol_type = other DNA
agcagtttcaatttggg

SEQ ID NO: 23905 - DNA, 17 bp, synthetic construct
  misc_feature 1..17: note = Oligonucleotide
  source 1..17: mol_type = other DNA
gggagcagtttcaattt

SEQ ID NO: 23906 - DNA, 17 bp, synthetic construct
  misc_feature 1..17: note = Oligonucleotide
  source 1..17: mol_type = other DNA
ggtgggagcagtttcaa

SEQ ID NO: 23907 - DNA, 17 bp, synthetic construct
  misc_feature 1..17: note = Oligonucleotide
  source 1..17: mol_type = other DNA
cctggtgggagcagttt

SEQ ID NO: 23908 - DNA, 17 bp, synthetic construct
  misc_feature 1..17: note = Oligonucleotide
  source 1..17: mol_type = other DNA
gaccctggtgggagcag

SEQ ID NO: 23909 - DNA, 17 bp, synthetic construct
  misc_feature 1..17: note = Oligonucleotide
  source 1..17: mol_type = other DNA
ggtgaccctggtgggag

SEQ ID NO: 23910 - DNA, 17 bp, synthetic construct
  misc_feature 1..17: note = Oligonucleotide
  source 1..17: mol_type = other DNA
gccggtgaccctggtgg

SEQ ID NO: 23911 - DNA, 17 bp, synthetic construct
  misc_feature 1..17: note = Oligonucleotide
  source 1..17: mol_type = other DNA
gccgccggtgaccctgg

SEQ ID NO: 23912 - DNA, 17 bp, synthetic construct
  misc_feature 1..17: note = Oligonucleotide
  source 1..17: mol_type = other DNA
gaggccgccggtgaccc

SEQ ID NO: 23913 - DNA, 17 bp, synthetic construct
  misc_feature 1..17: note = Oligonucleotide
  source 1..17: mol_type = other DNA
ctggaggccgccggtga

SEQ ID NO: 23914 - DNA, 17 bp, synthetic construct
  misc_feature 1..17: note = Oligonucleotide
  source 1..17: mol_type = other DNA
gccctggaggccgccgg

SEQ ID NO: 23915 - DNA, 17 bp, synthetic construct
  misc_feature 1..17: note = Oligonucleotide
  source 1..17: mol_type = other DNA
aaggccctggaggccgc

SEQ ID NO: 23916 - DNA, 17 bp, synthetic construct
  misc_feature 1..17: note = Oligonucleotide
  source 1..17: mol_type = other DNA
aggaaggccctggaggc

SEQ ID NO: 23917 - DNA, 17 bp, synthetic construct
  misc_feature 1..17: note = Oligonucleotide
  source 1..17: mol_type = other DNA
gggaggaaggccctgga

SEQ ID NO: 23918 - DNA, 17 bp, synthetic construct
  misc_feature 1..17: note = Oligonucleotide
  source 1..17: mol_type = other DNA
atggggaggaaggccct

SEQ ID NO: 23919 - DNA, 17 bp, synthetic construct
  misc_feature 1..17: note = Oligonucleotide
  source 1..17: mol_type = other DNA
tccatggggaggaaggc

SEQ ID NO: 23920 - DNA, 17 bp, synthetic construct
  misc_feature 1..17: note = Oligonucleotide
  source 1..17: mol_type = other DNA
gcatccatggggaggaa

SEQ ID NO: 23921 - DNA, 17 bp, synthetic construct
  misc_feature 1..17: note = Oligonucleotide
  source 1..17: mol_type = other DNA
catgcatccatggggag

SEQ ID NO: 23922 - DNA, 17 bp, synthetic construct
  misc_feature 1..17: note = Oligonucleotide
  source 1..17: mol_type = other DNA
ggccatgcatccatggg

SEQ ID NO: 23923 - DNA, 17 bp, synthetic construct
  misc_feature 1..17: note = Oligonucleotide
  source 1..17: mol_type = other DNA
gctggccatgcatccat

SEQ ID NO: 23924 - DNA, 17 bp, synthetic construct
  misc_feature 1..17: note = Oligonucleotide
  source 1..17: mol_type = other DNA
agtgctggccatgcatc

SEQ ID NO: 23925 - DNA, 17 bp, synthetic construct
  misc_feature 1..17: note = Oligonucleotide
  source 1..17: mol_type = other DNA
aggagtgctggccatgc

SEQ ID NO: 23926 - DNA, 17 bp, synthetic construct
  misc_feature 1..17: note = Oligonucleotide
  source 1..17: mol_type = other DNA
agcaggagtgctggcca

SEQ ID NO: 23927 - DNA, 17 bp, synthetic construct
  misc_feature 1..17: note = Oligonucleotide
  source 1..17: mol_type = other DNA
gtcagcaggagtgctgg

SEQ ID NO: 23928 - DNA, 17 bp, synthetic construct
  misc_feature 1..17: note = Oligonucleotide
  source 1..17: mol_type = other DNA
gaggtcagcaggagtgc

SEQ ID NO: 23929 - DNA, 17 bp, synthetic construct
  misc_feature 1..17: note = Oligonucleotide
  source 1..17: mol_type = other DNA
gctgaggtcagcaggag

SEQ ID NO: 23930 - DNA, 17 bp, synthetic construct
  misc_feature 1..17: note = Oligonucleotide
  source 1..17: mol_type = other DNA
ccagctgaggtcagcag

SEQ ID NO: 23931 - DNA, 17 bp, synthetic construct
  misc_feature 1..17: note = Oligonucleotide
  source 1..17: mol_type = other DNA
atgccagctgaggtcag

SEQ ID NO: 23932 - DNA, 17 bp, synthetic construct
  misc_feature 1..17: note = Oligonucleotide
  source 1..17: mol_type = other DNA
caaatgccagctgaggt

SEQ ID NO: 23933 - DNA, 17 bp, synthetic construct
  misc_feature 1..17: note = Oligonucleotide
  source 1..17: mol_type = other DNA
aaccaaatgccagctga

SEQ ID NO: 23934 - DNA, 17 bp, synthetic construct
  misc_feature 1..17: note = Oligonucleotide
  source 1..17: mol_type = other DNA
agaaaccaaatgccagc

SEQ ID NO: 23935 - DNA, 17 bp, synthetic construct
  misc_feature 1..17: note = Oligonucleotide
  source 1..17: mol_type = other DNA
caaagaaaccaaatgcc

SEQ ID NO: 23936 - DNA, 17 bp, synthetic construct
  misc_feature 1..17: note = Oligonucleotide
  source 1..17: mol_type = other DNA
gagcaaagaaaccaaat

SEQ ID NO: 23937 - DNA, 17 bp, synthetic construct
  misc_feature 1..17: note = Oligonucleotide
  source 1..17: mol_type = other DNA
aaggagcaaagaaacca

SEQ ID NO: 23938 - DNA, 17 bp, synthetic construct
  misc_feature 1..17: note = Oligonucleotide
  source 1..17: mol_type = other DNA
aagaaggagcaaagaaa

SEQ ID NO: 23939 - DNA, 17 bp, synthetic construct
  misc_feature 1..17: note = Oligonucleotide
  source 1..17: mol_type = other DNA
cggaagaaggagcaaag

SEQ ID NO: 23940 - DNA, 17 bp, synthetic construct
  misc_feature 1..17: note = Oligonucleotide
  source 1..17: mol_type = other DNA
tcacggaagaaggagca

SEQ ID NO: 23941 - DNA, 17 bp, synthetic construct
  misc_feature 1..17: note = Oligonucleotide
  source 1..17: mol_type = other DNA
gtttcacggaagaagga

SEQ ID NO: 23942 - DNA, 17 bp, synthetic construct
  misc_feature 1..17: note = Oligonucleotide
  source 1..17: mol_type = other DNA
agcgtttcacggaagaa

SEQ ID NO: 23943 - DNA, 17 bp, synthetic construct
  misc_feature 1..17: note = Oligonucleotide
  source 1..17: mol_type = other DNA
aggagcgtttcacggaa

SEQ ID NO: 23944 - DNA, 17 bp, synthetic construct
  misc_feature 1..17: note = Oligonucleotide
  source 1..17: mol_type = other DNA
gggaggagcgtttcacg

SEQ ID NO: 23945 - DNA, 17 bp, synthetic construct
  misc_feature 1..17: note = Oligonucleotide
  source 1..17: mol_type = other DNA
ttggggaggagcgtttc

SEQ ID NO: 23946 - DNA, 17 bp, synthetic construct
  misc_feature 1..17: note = Oligonucleotide
  source 1..17: mol_type = other DNA
gctttggggaggagcgt

SEQ ID NO: 23947 - DNA, 17 bp, synthetic construct
  misc_feature 1..17: note = Oligonucleotide
  source 1..17: mol_type = other DNA
aaagctttggggaggag

SEQ ID NO: 23948 - DNA, 17 bp, synthetic construct
  misc_feature 1..17: note = Oligonucleotide
  source 1..17: mol_type = other DNA
cctaaagctttggggag

SEQ ID NO: 23949 - DNA, 17 bp, synthetic construct
  misc_feature 1..17: note = Oligonucleotide
  source 1..17: mol_type = other DNA
tgtcctaaagctttggg

SEQ ID NO: 23950 - DNA, 17 bp, synthetic construct
  misc_feature 1..17: note = Oligonucleotide
  source 1..17: mol_type = other DNA
tgttgtcctaaagcttt

SEQ ID NO: 23951 - DNA, 17 bp, synthetic construct
  misc_feature 1..17: note = Oligonucleotide
  source 1..17: mol_type = other DNA
aagtgttgtcctaaagc

SEQ ID NO: 23952 - DNA, 17 bp, synthetic construct
  misc_feature 1..17: note = Oligonucleotide
  source 1..17: mol_type = other DNA
agtaagtgttgtcctaa

SEQ ID NO: 23953 - DNA, 17 bp, synthetic construct
  misc_feature 1..17: note = Oligonucleotide
  source 1..17: mol_type = other DNA
accagtaagtgttgtcc

SEQ ID NO: 23954 - DNA, 17 bp, synthetic construct
  misc_feature 1..17: note = Oligonucleotide
  source 1..17: mol_type = other DNA
aaaaccagtaagtgttg

SEQ ID NO: 23955 - DNA, 17 bp, synthetic construct
  misc_feature 1..17: note = Oligonucleotide
  source 1..17: mol_type = other DNA
gggaaaaccagtaagtg

SEQ ID NO: 23956 - DNA, 17 bp, synthetic construct
  misc_feature 1..17: note = Oligonucleotide
  source 1..17: mol_type = other DNA
gaggggaaaaccagtaa

SEQ ID NO: 23957 - DNA, 17 bp, synthetic construct
  misc_feature 1..17: note = Oligonucleotide
  source 1..17: mol_type = other DNA
aaggaggggaaaaccag

SEQ ID NO: 23958 - DNA, 17 bp, synthetic construct
  misc_feature 1..17: note = Oligonucleotide
  source 1..17: mol_type = other DNA
agaaaggaggggaaaac

SEQ ID NO: 23959 - DNA, 17 bp, synthetic construct
  misc_feature 1..17: note = Oligonucleotide
  source 1..17: mol_type = other DNA
ctgagaaaggaggggaa

SEQ ID NO: 23960 - DNA, 17 bp, synthetic construct
  misc_feature 1..17: note = Oligonucleotide
  source 1..17: mol_type = other DNA
catctgagaaaggaggg

SEQ ID NO: 23961 - DNA, 17 bp, synthetic construct
  misc_feature 1..17: note = Oligonucleotide
  source 1..17: mol_type = other DNA
tgccatctgagaaagga

SEQ ID NO: 23962 - DNA, 17 bp, synthetic construct
  misc_feature 1..17: note = Oligonucleotide
  source 1..17: mol_type = other DNA
aggtgccatctgagaaa

SEQ ID NO: 23963 - DNA, 17 bp, synthetic construct
  misc_feature 1..17: note = Oligonucleotide
  source 1..17: mol_type = other DNA
aataggtgccatctgag

SEQ ID NO: 23964 - DNA, 17 bp, synthetic construct
  misc_feature 1..17: note = Oligonucleotide
  source 1..17: mol_type = other DNA
tgaaataggtgccatct

SEQ ID NO: 23965 - DNA, 17 bp, synthetic construct
  misc_feature 1..17: note = Oligonucleotide
  source 1..17: mol_type = other DNA
ggttgaaataggtgcca

SEQ ID NO: 23966 - DNA, 17 bp, synthetic construct
  misc_feature 1..17: note = Oligonucleotide
  source 1..17: mol_type = other DNA
cagggttgaaataggtg

SEQ ID NO: 23967 - DNA, 17 bp, synthetic construct
  misc_feature 1..17: note = Oligonucleotide
  source 1..17: mol_type = other DNA
cggcagggttgaaatag

SEQ ID NO: 23968 - DNA, 17 bp, synthetic construct
  misc_feature 1..17: note = Oligonucleotide
  source 1..17: mol_type = other DNA
gggcggcagggttgaaa

SEQ ID NO: 23969 - DNA, 17 bp, synthetic construct
  misc_feature 1..17: note = Oligonucleotide
  source 1..17: mol_type = other DNA
ctggggcggcagggttg

SEQ ID NO: 23970 - DNA, 17 bp, synthetic construct
  misc_feature 1..17: note = Oligonucleotide
  source 1..17: mol_type = other DNA
aggctggggcggcaggg

SEQ ID NO: 23971 - DNA, 17 bp, synthetic construct
  misc_feature 1..17: note = Oligonucleotide
  source 1..17: mol_type = other DNA
gggaggctggggcggca

SEQ ID NO: 23972 - DNA, 17 bp, synthetic construct
  misc_feature 1..17: note = Oligonucleotide
  source 1..17: mol_type = other DNA
tttgggaggctggggcg

SEQ ID NO: 23973 - DNA, 17 bp, synthetic construct
  misc_feature 1..17: note = Oligonucleotide
  source 1..17: mol_type = other DNA
atatttgggaggctggg

SEQ ID NO: 23974 - DNA, 17 bp, synthetic construct
  misc_feature 1..17: note = Oligonucleotide
  source 1..17: mol_type = other DNA
cccatatttgggaggct

SEQ ID NO: 23975 - DNA, 17 bp, synthetic construct
  misc_feature 1..17: note = Oligonucleotide
  source 1..17: mol_type = other DNA
ggtcccatatttgggag

SEQ ID NO: 23976 - DNA, 17 bp, synthetic construct
  misc_feature 1..17: note = Oligonucleotide
  source 1..17: mol_type = other DNA
aaaggtcccatatttgg

SEQ ID NO: 23977 - DNA, 17 bp, synthetic construct
  misc_feature 1..17: note = Oligonucleotide
  source 1..17: mol_type = other DNA
tgaaaaggtcccatatt

SEQ ID NO: 23978 - DNA, 17 bp, synthetic construct
  misc_feature 1..17: note = Oligonucleotide
  source 1..17: mol_type = other DNA
ccttgaaaaggtcccat

SEQ ID NO: 23979 - DNA, 17 bp, synthetic construct
  misc_feature 1..17: note = Oligonucleotide
  source 1..17: mol_type = other DNA
cagccttgaaaaggtcc

SEQ ID NO: 23980 - DNA, 17 bp, synthetic construct
  misc_feature 1..17: note = Oligonucleotide
  source 1..17: mol_type = other DNA
acacagccttgaaaagg

SEQ ID NO: 23981 - DNA, 17 bp, synthetic construct
  misc_feature 1..17: note = Oligonucleotide
  source 1..17: mol_type = other DNA
aagacacagccttgaaa

SEQ ID NO: 23982 - DNA, 17 bp, synthetic construct
  misc_feature 1..17: note = Oligonucleotide
  source 1..17: mol_type = other DNA
ctgaagacacagccttg

SEQ ID NO: 23983 - DNA, 17 bp, synthetic construct
  misc_feature 1..17: note = Oligonucleotide
  source 1..17: mol_type = other DNA
aggctgaagacacagcc

SEQ ID NO: 23984 - DNA, 17 bp, synthetic construct
  misc_feature 1..17: note = Oligonucleotide
  source 1..17: mol_type = other DNA
aggaggctgaagacaca

SEQ ID NO: 23985 - DNA, 17 bp, synthetic construct
  misc_feature 1..17: note = Oligonucleotide
  source 1..17: mol_type = other DNA
ggaaggaggctgaagac

SEQ ID NO: 23986 - DNA, 17 bp, synthetic construct
  misc_feature 1..17: note = Oligonucleotide
  source 1..17: mol_type = other DNA
aggggaaggaggctgaa

SEQ ID NO: 23987 - DNA, 17 bp, synthetic construct
  misc_feature 1..17: note = Oligonucleotide
  source 1..17: mol_type = other DNA
cagaggggaaggaggct

SEQ ID NO: 23988 - DNA, 17 bp, synthetic construct
  misc_feature 1..17: note = Oligonucleotide
  source 1..17: mol_type = other DNA
gcacagaggggaaggag

SEQ ID NO: 23989 - DNA, 17 bp, synthetic construct
  misc_feature 1..17: note = Oligonucleotide
  source 1..17: mol_type = other DNA
gaggcacagaggggaag

SEQ ID NO: 23990 - DNA, 17 bp, synthetic construct
  misc_feature 1..17: note = Oligonucleotide
  source 1..17: mol_type = other DNA
ggtgaggcacagagggg

SEQ ID NO: 23991 - DNA, 17 bp, synthetic construct
  misc_feature 1..17: note = Oligonucleotide
  source 1..17: mol_type = other DNA
agtggtgaggcacagag

SEQ ID NO: 23992 - DNA, 17 bp, synthetic construct
  misc_feature 1..17: note = Oligonucleotide
  source 1..17: mol_type = other DNA
gggagtggtgaggcaca

SEQ ID NO: 23993 - DNA, 17 bp, synthetic construct
  misc_feature 1..17: note = Oligonucleotide
  source 1..17: mol_type = other DNA
ctggggagtggtgaggc

SEQ ID NO: 23994 - DNA, 17 bp, synthetic construct
  misc_feature 1..17: note = Oligonucleotide
  source 1..17: mol_type = other DNA
tggctggggagtggtga

SEQ ID NO: 23995 - DNA, 17 bp, synthetic construct
  misc_feature 1..17: note = Oligonucleotide
  source 1..17: mol_type = other DNA
tggtggctggggagtgg

SEQ ID NO: 23996 - DNA, 17 bp, synthetic construct
  misc_feature 1..17: note = Oligonucleotide
  source 1..17: mol_type = other DNA
tgatggtggctggggag

SEQ ID NO: 23997 - DNA, 17 bp, synthetic construct
  misc_feature 1..17: note = Oligonucleotide
  source 1..17: mol_type = other DNA
gtgtgatggtggctggg

SEQ ID NO: 23998 - DNA, 17 bp, synthetic construct
  misc_feature 1..17: note = Oligonucleotide
  source 1..17: mol_type = other DNA
ggagtgtgatggtggct

SEQ ID NO: 23999 - DNA, 17 bp, synthetic construct
  misc_feature 1..17: note = Oligonucleotide
  source 1..17: mol_type = other DNA
tgtggagtgtgatggtg

SEQ ID NO: 24000 - DNA, 17 bp, synthetic construct
  misc_feature 1..17: note = Oligonucleotide
  source 1..17: mol_type = other DNA
gagtgtggagtgtgatg

SEQ ID NO: 24001 - DNA, 17 bp, synthetic construct
  misc_feature 1..17: note = Oligonucleotide
  source 1..17: mol_type = other DNA
ggtgagtgtggagtgtg

SEQ ID NO: 24002 - DNA, 17 bp, synthetic construct
  misc_feature 1..17: note = Oligonucleotide
  source 1..17: mol_type = other DNA
gacggtgagtgtggagt

SEQ ID NO: 24003 - DNA, 17 bp, synthetic construct
  misc_feature 1..17: note = Oligonucleotide
  source 1..17: mol_type = other DNA
ggagacggtgagtgtgg

SEQ ID NO: 24004 - DNA, 17 bp, synthetic construct
  misc_feature 1..17: note = Oligonucleotide
  source 1..17: mol_type = other DNA
aaaggagacggtgagtg

SEQ ID NO: 24005 - DNA, 17 bp, synthetic construct
  misc_feature 1..17: note = Oligonucleotide
  source 1..17: mol_type = other DNA
aggaaaggagacggtga

SEQ ID NO: 24006 - DNA, 17 bp, synthetic construct
  misc_feature 1..17: note = Oligonucleotide
  source 1..17: mol_type = other DNA
gtcaggaaaggagacgg

SEQ ID NO: 24007 - DNA, 17 bp, synthetic construct
  misc_feature 1..17: note = Oligonucleotide
  source 1..17: mol_type = other DNA
tgggtcaggaaaggaga

SEQ ID NO: 24008 - DNA, 17 bp, synthetic construct
  misc_feature 1..17: note = Oligonucleotide
  source 1..17: mol_type = other DNA
atctgggtcaggaaagg

SEQ ID NO: 24009 - DNA, 17 bp, synthetic construct
  misc_feature 1..17: note = Oligonucleotide
  source 1..17: mol_type = other DNA
cccatctgggtcaggaa

SEQ ID NO: 24010 - DNA, 17 bp, synthetic construct
  misc_feature 1..17: note = Oligonucleotide
  source 1..17: mol_type = other DNA
gtccccatctgggtcag

SEQ ID NO: 24011 - DNA, 17 bp, synthetic construct
  misc_feature 1..17: note = Oligonucleotide
  source 1..17: mol_type = other DNA
catgtccccatctgggt

SEQ ID NO: 24012 - DNA, 17 bp, synthetic construct
  misc_feature 1..17: note = Oligonucleotide
  source 1..17: mol_type = other DNA
ttacatgtccccatctg

SEQ ID NO: 24013 - DNA, 17 bp, synthetic construct
  misc_feature 1..17: note = Oligonucleotide
  source 1..17: mol_type = other DNA
ttgttacatgtccccat

SEQ ID NO: 24014 - DNA, 17 bp, synthetic construct
  misc_feature 1..17: note = Oligonucleotide
  source 1..17: mol_type = other DNA
ggcttgttacatgtccc

SEQ ID NO: 24015 - DNA, 17 bp, synthetic construct
  misc_feature 1..17: note = Oligonucleotide
  source 1..17: mol_type = other DNA
cagggcttgttacatgt

SEQ ID NO: 24016 - DNA, 17 bp, synthetic construct
  misc_feature 1..17: note = Oligonucleotide
  source 1..17: mol_type = other DNA
gggcagggcttgttaca

SEQ ID NO: 24017 - DNA, 17 bp, synthetic construct
  misc_feature 1..17: note = Oligonucleotide
  source 1..17: mol_type = other DNA
agtgggcagggcttgtt

SEQ ID NO: 24018 - DNA, 17 bp, synthetic construct
  misc_feature 1..17: note = Oligonucleotide
  source 1..17: mol_type = other DNA
cacagtgggcagggctt

SEQ ID NO: 24019 - DNA, 17 bp, synthetic construct
  misc_feature 1..17: note = Oligonucleotide
  source 1..17: mol_type = other DNA
atgcacagtgggcaggg

SEQ ID NO: 24020 - DNA, 17 bp, synthetic construct
  misc_feature 1..17: note = Oligonucleotide
  source 1..17: mol_type = other DNA
gggatgcacagtgggca

SEQ ID NO: 24021 - DNA, 17 bp, synthetic construct
  misc_feature 1..17: note = Oligonucleotide
  source 1..17: mol_type = other DNA
ggagggatgcacagtgg

SEQ ID NO: 24022 - DNA, 17 bp, synthetic construct
  misc_feature 1..17: note = Oligonucleotide
  source 1..17: mol_type = other DNA
tctggagggatgcacag

SEQ ID NO: 24023 - DNA, 17 bp, synthetic construct
  misc_feature 1..17: note = Oligonucleotide
  source 1..17: mol_type = other DNA
atgtctggagggatgca

SEQ ID NO: 24024 - DNA, 17 bp, synthetic construct
  misc_feature 1..17: note = Oligonucleotide
  source 1..17: mol_type = other DNA
tggatgtctggagggat

SEQ ID NO: 24025 - DNA, 17 bp, synthetic construct
  misc_feature 1..17: note = Oligonucleotide
  source 1..17: mol_type = other DNA
gagtggatgtctggagg

SEQ ID NO: 24026 - DNA, 17 bp, synthetic construct
  misc_feature 1..17: note = Oligonucleotide
  source 1..17: mol_type = other DNA
ggagagtggatgtctgg

SEQ ID NO: 24027 - DNA, 17 bp, synthetic construct
  misc_feature 1..17: note = Oligonucleotide
  source 1..17: mol_type = other DNA
acgggagagtggatgtc

SEQ ID NO: 24028 - DNA, 17 bp, synthetic construct
  misc_feature 1..17: note = Oligonucleotide
  source 1..17: mol_type = other DNA
gggacgggagagtggat

SEQ ID NO: 24029 - DNA, 17 bp, synthetic construct
  misc_feature 1..17: note = Oligonucleotide
  source 1..17: mol_type = other DNA
caggggacgggagagtg

SEQ ID NO: 24030 - DNA, 17 bp, synthetic construct
  misc_feature 1..17: note = Oligonucleotide
  source 1..17: mol_type = other DNA
gggcaggggacgggaga

SEQ ID NO: 24031 - DNA, 17 bp, synthetic construct
  misc_feature 1..17: note = Oligonucleotide
  source 1..17: mol_type = other DNA
ggtgggcaggggacggg

SEQ ID NO: 24032 - DNA, 17 bp, synthetic construct
  misc_feature 1..17: note = Oligonucleotide
  source 1..17: mol_type = other DNA
acaggtgggcaggggac

SEQ ID NO: 24033 - DNA, 17 bp, synthetic construct
  misc_feature 1..17: note = Oligonucleotide
  source 1..17: mol_type = other DNA
tgcacaggtgggcaggg

SEQ ID NO: 24034 - DNA, 17 bp, synthetic construct
  misc_feature 1..17: note = Oligonucleotide
  source 1..17: mol_type = other DNA
agatgcacaggtgggca

SEQ ID NO: 24035 - DNA, 17 bp, synthetic construct
  misc_feature 1..17: note = Oligonucleotide
  source 1..17: mol_type = other DNA
gacagatgcacaggtgg

SEQ ID NO: 24036 - DNA, 17 bp, synthetic construct
  misc_feature 1..17: note = Oligonucleotide
  source 1..17: mol_type = other DNA
gtggacagatgcacagg

SEQ ID NO: 24037 - DNA, 17 bp, synthetic construct
  misc_feature 1..17: note = Oligonucleotide
  source 1..17: mol_type = other DNA
tgggtggacagatgcac

SEQ ID NO: 24038 - DNA, 17 bp, synthetic construct
  misc_feature 1..17: note = Oligonucleotide
  source 1..17: mol_type = other DNA
gtgtgggtggacagatg

SEQ ID NO: 24039 - DNA, 17 bp, synthetic construct
  misc_feature 1..17: note = Oligonucleotide
  source 1..17: mol_type = other DNA
ggtgtgtgggtggacag

SEQ ID NO: 24040 - DNA, 17 bp, synthetic construct
  misc_feature 1..17: note = Oligonucleotide
  source 1..17: mol_type = other DNA
gcaggtgtgtgggtgga

SEQ ID NO: 24041 - DNA, 17 bp, synthetic construct
  misc_feature 1..17: note = Oligonucleotide
  source 1..17: mol_type = other DNA
tgggcaggtgtgtgggt

SEQ ID NO: 24042 - DNA, 17 bp, synthetic construct
  misc_feature 1..17: note = Oligonucleotide
  source 1..17: mol_type = other DNA
aagtgggcaggtgtgtg

SEQ ID NO: 24043 - DNA, 17 bp, synthetic construct
  misc_feature 1..17: note = Oligonucleotide
  source 1..17: mol_type = other DNA
gtcaagtgggcaggtgt

SEQ ID NO: 24044 - DNA, 17 bp, synthetic construct
  misc_feature 1..17: note = Oligonucleotide
  source 1..17: mol_type = other DNA
acggtcaagtgggcagg

SEQ ID NO: 24045 - DNA, 17 bp, synthetic construct
  misc_feature 1..17: note = Oligonucleotide
  source 1..17: mol_type = other DNA
cggacggtcaagtgggc

SEQ ID NO: 24046 - DNA, 17 bp, synthetic construct
  misc_feature 1..17: note = Oligonucleotide
  source 1..17: mol_type = other DNA
caacggacggtcaagtg

SEQ ID NO: 24047 - DNA, 17 bp, synthetic construct
  misc_feature 1..17: note = Oligonucleotide
  source 1..17: mol_type = other DNA
ggacaacggacggtcaa

SEQ ID NO: 24048 - DNA, 17 bp, synthetic construct
  misc_feature 1..17: note = Oligonucleotide
  source 1..17: mol_type = other DNA
tatggacaacggacggt

SEQ ID NO: 24049 - DNA, 17 bp, synthetic construct
  misc_feature 1..17: note = Oligonucleotide
  source 1..17: mol_type = other DNA
ttgtatggacaacggac

SEQ ID NO: 24050 - DNA, 17 bp, synthetic construct
  misc_feature 1..17: note = Oligonucleotide
  source 1..17: mol_type = other DNA
ggtttgtatggacaacg

SEQ ID NO: 24051 - DNA, 17 bp, synthetic construct
  misc_feature 1..17: note = Oligonucleotide
  source 1..17: mol_type = other DNA
tggggtttgtatggaca

SEQ ID NO: 24052 - DNA, 17 bp, synthetic construct
  misc_feature 1..17: note = Oligonucleotide
  source 1..17: mol_type = other DNA
tgctggggtttgtatgg

SEQ ID NO: 24053 - DNA, 17 bp, synthetic construct
  misc_feature 1..17: note = Oligonucleotide
  source 1..17: mol_type = other DNA
gtgtgctggggtttgta

SEQ ID NO: 24054 - DNA, 17 bp, synthetic construct
  misc_feature 1..17: note = Oligonucleotide
  source 1..17: mol_type = other DNA
gaggtgtgctggggttt

SEQ ID NO: 24055 - DNA, 17 bp, synthetic construct
  misc_feature 1..17: note = Oligonucleotide
  source 1..17: mol_type = other DNA
tgggaggtgtgctgggg

SEQ ID NO: 24056 - DNA, 17 bp, synthetic construct
  misc_feature 1..17: note = Oligonucleotide
  source 1..17: mol_type = other DNA
agatgggaggtgtgctg

SEQ ID NO: 24057 - DNA, 17 bp, synthetic construct
  misc_feature 1..17: note = Oligonucleotide
  source 1..17: mol_type = other DNA
aacagatgggaggtgtg

SEQ ID NO: 24058 - DNA, 17 bp, synthetic construct
  misc_feature 1..17: note = Oligonucleotide
  source 1..17: mol_type = other DNA
tgtaacagatgggaggt

SEQ ID NO: 24059 - DNA, 17 bp, synthetic construct
  misc_feature 1..17: note = Oligonucleotide
  source 1..17: mol_type = other DNA
atgtgtaacagatggga

SEQ ID NO: 24060 - DNA, 17 bp, synthetic construct
  misc_feature 1..17: note = Oligonucleotide
  source 1..17: mol_type = other DNA
cctatgtgtaacagatg

SEQ ID NO: 24061 - DNA, 17 bp, synthetic construct
  misc_feature 1..17: note = Oligonucleotide
  source 1..17: mol_type = other DNA
actcctatgtgtaacag

SEQ ID NO: 24062 - DNA, 17 bp, synthetic construct
  misc_feature 1..17: note = Oligonucleotide
  source 1..17: mol_type = other DNA
tttactcctatgtgtaa

SEQ ID NO: 24063 - DNA, 17 bp, synthetic construct
  misc_feature 1..17: note = Oligonucleotide
  source 1..17: mol_type = other DNA
aggtttactcctatgtg

SEQ ID NO: 24064 - DNA, 17 bp, synthetic construct
  misc_feature 1..17: note = Oligonucleotide
  source 1..17: mol_type = other DNA
gagaggtttactcctat

SEQ ID NO: 24065 - DNA, 17 bp, synthetic construct
  misc_feature 1..17: note = Oligonucleotide
  source 1..17: mol_type = other DNA
gctgagaggtttactcc

SEQ ID NO: 24066 - DNA, 17 bp, synthetic construct
  misc_feature 1..17: note = Oligonucleotide
  source 1..17: mol_type = other DNA
agtgctgagaggtttac

SEQ ID NO: 24067 - DNA, 17 bp, synthetic construct
  misc_feature 1..17: note = Oligonucleotide
  source 1..17: mol_type = other DNA
gtaagtgctgagaggtt

SEQ ID NO: 24068 - DNA, 17 bp, synthetic construct
  misc_feature 1..17: note = Oligonucleotide
  source 1..17: mol_type = other DNA
gtagtaagtgctgagag

SEQ ID NO: 24069 - DNA, 17 bp, synthetic construct
  misc_feature 1..17: note = Oligonucleotide
  source 1..17: mol_type = other DNA
cccgtagtaagtgctga

SEQ ID NO: 24070 - DNA, 17 bp, synthetic construct
  misc_feature 1..17: note = Oligonucleotide
  source 1..17: mol_type = other DNA
cagcccgtagtaagtgc

SEQ ID NO: 24071 - DNA, 17 bp, synthetic construct
  misc_feature 1..17: note = Oligonucleotide
  source 1..17: mol_type = other DNA
gtccagcccgtagtaag

SEQ ID NO: 24072 - DNA, 17 bp, synthetic construct
  misc_feature 1..17: note = Oligonucleotide
  source 1..17: mol_type = other DNA
agtgtccagcccgtagt

SEQ ID NO: 24073 - DNA, 17 bp, synthetic construct
  misc_feature 1..17: note = Oligonucleotide
  source 1..17: mol_type = other DNA
ctcagtgtccagcccgt

SEQ ID NO: 24074 - DNA, 17 bp, synthetic construct
  misc_feature 1..17: note = Oligonucleotide
  source 1..17: mol_type = other DNA
atgctcagtgtccagcc

SEQ ID NO: 24075 - DNA, 17 bp, synthetic construct
  misc_feature 1..17: note = Oligonucleotide
  source 1..17: mol_type = other DNA
taaatgctcagtgtcca

SEQ ID NO: 24076 - DNA, 17 bp, synthetic construct
  misc_feature 1..17: note = Oligonucleotide
  source 1..17: mol_type = other DNA
tattaaatgctcagtgt

SEQ ID NO: 24077 - DNA, 17 bp, synthetic construct
  misc_feature 1..17: note = Oligonucleotide
  source 1..17: mol_type = other DNA
aagtattaaatgctcag

SEQ ID NO: 24078 - DNA, 17 bp, synthetic construct
  misc_feature 1..17: note = Oligonucleotide
  source 1..17: mol_type = other DNA
tctaagtattaaatgct

SEQ ID NO: 24079 - DNA, 17 bp, synthetic construct
  misc_feature 1..17: note = Oligonucleotide
  source 1..17: mol_type = other DNA
tattctaagtattaaat

SEQ ID NO: 24080 - DNA, 17 bp, synthetic construct
  misc_feature 1..17: note = Oligonucleotide
  source 1..17: mol_type = other DNA
ggttattctaagtatta

SEQ ID NO: 24081 - DNA, 17 bp, synthetic construct
  misc_feature 1..17: note = Oligonucleotide
  source 1..17: mol_type = other DNA
tatggttattctaagta

SEQ ID NO: 24082 - DNA, 17 bp, synthetic construct
  misc_feature 1..17: note = Oligonucleotide
  source 1..17: mol_type = other DNA
caatatggttattctaa

SEQ ID NO: 24083 - DNA, 17 bp, synthetic construct
  misc_feature 1..17: note = Oligonucleotide
  source 1..17: mol_type = other DNA
cctcaatatggttattc

SEQ ID NO: 24084 - DNA, 17 bp, synthetic construct
  misc_feature 1..17: note = Oligonucleotide
  source 1..17: mol_type = other DNA
caacctcaatatggtta

SEQ ID NO: 24085 - DNA, 17 bp, synthetic construct
  misc_feature 1..17: note = Oligonucleotide
  source 1..17: mol_type = other DNA
tctcaacctcaatatgg

SEQ ID NO: 24086 - DNA, 17 bp, synthetic construct
  misc_feature 1..17: note = Oligonucleotide
  source 1..17: mol_type = other DNA
tggtctcaacctcaata

SEQ ID NO: 24087 - DNA, 17 bp, synthetic construct
  misc_feature 1..17: note = Oligonucleotide
  source 1..17: mol_type = other DNA
tagtggtctcaacctca

SEQ ID NO: 24088 - DNA, 17 bp, synthetic construct
  misc_feature 1..17: note = Oligonucleotide
  source 1..17: mol_type = other DNA
tactagtggtctcaacc

SEQ ID NO: 24089 - DNA, 17 bp, synthetic construct
  misc_feature 1..17: note = Oligonucleotide
  source 1..17: mol_type = other DNA
aggtactagtggtctca

SEQ ID NO: 24090 - DNA, 17 bp, synthetic construct
  misc_feature 1..17: note = Oligonucleotide
  source 1..17: mol_type = other DNA
tggaggtactagtggtc

SEQ ID NO: 24091 - DNA, 17 bp, synthetic construct
  misc_feature 1..17: note = Oligonucleotide
  source 1..17: mol_type = other DNA
aaatggaggtactagtg

SEQ ID NO: 24092 - DNA, 17 bp, synthetic construct
  misc_feature 1..17: note = Oligonucleotide
  source 1..17: mol_type = other DNA
gtaaaatggaggtacta

SEQ ID NO: 24093 - DNA, 17 bp, synthetic construct
  misc_feature 1..17: note = Oligonucleotide
  source 1..17: mol_type = other DNA
tctgtaaaatggaggta

SEQ ID NO: 24094 - DNA, 17 bp, synthetic construct
  misc_feature 1..17: note = Oligonucleotide
  source 1..17: mol_type = other DNA
tcatctgtaaaatggag

SEQ ID NO: 24095 - DNA, 17 bp, synthetic construct
  misc_feature 1..17: note = Oligonucleotide
  source 1..17: mol_type = other DNA
ttctcatctgtaaaatg

SEQ ID NO: 24096 - DNA, 17 bp, synthetic construct
  misc_feature 1..17: note = Oligonucleotide
  source 1..17: mol_type = other DNA
gttttctcatctgtaaa

SEQ ID NO: 24097 - DNA, 17 bp, synthetic construct
  misc_feature 1..17: note = Oligonucleotide
  source 1..17: mol_type = other DNA
tcagttttctcatctgt

SEQ ID NO: 24098 - DNA, 17 bp, synthetic construct
  misc_feature 1..17: note = Oligonucleotide
  source 1..17: mol_type = other DNA
gcttcagttttctcatc

SEQ ID NO: 24099 - DNA, 17 bp, synthetic construct
  misc_feature 1..17: note = Oligonucleotide
  source 1..17: mol_type = other DNA
cttgcttcagttttctc

SEQ ID NO: 24100 - DNA, 17 bp, synthetic construct
  misc_feature 1..17: note = Oligonucleotide
  source 1..17: mol_type = other DNA
ctccttgcttcagtttt

SEQ ID NO: 24101 - DNA, 17 bp, synthetic construct
  misc_feature 1..17: note = Oligonucleotide
  source 1..17: mol_type = other DNA
accctccttgcttcagt

SEQ ID NO: 24102 - DNA, 17 bp, synthetic construct
  misc_feature 1..17: note = Oligonucleotide
  source 1..17: mol_type = other DNA
tttaccctccttgcttc

SEQ ID NO: 24103 - DNA, 17 bp, synthetic construct
  misc_feature 1..17: note = Oligonucleotide
  source 1..17: mol_type = other DNA
tcatttaccctccttgc

SEQ ID NO: 24104 - DNA, 17 bp, synthetic construct
  misc_feature 1..17: note = Oligonucleotide
  source 1..17: mol_type = other DNA
aggtcatttaccctcct

SEQ ID NO: 24105 - DNA, 17 bp, synthetic construct
  misc_feature 1..17: note = Oligonucleotide
  source 1..17: mol_type = other DNA
ggcaggtcatttaccct

SEQ ID NO: 24106 - DNA, 17 bp, synthetic construct
  misc_feature 1..17: note = Oligonucleotide
  source 1..17: mol_type = other DNA
ttgggcaggtcatttac

SEQ ID NO: 24107 - DNA, 17 bp, synthetic construct
  misc_feature 1..17: note = Oligonucleotide
  source 1..17: mol_type = other DNA
atcttgggcaggtcatt

SEQ ID NO: 24108 - DNA, 17 bp, synthetic construct
  misc_feature 1..17: note = Oligonucleotide
  source 1..17: mol_type = other DNA
gtgatcttgggcaggtc

SEQ ID NO: 24109 - DNA, 17 bp, synthetic construct
  misc_feature 1..17: note = Oligonucleotide
  source 1..17: mol_type = other DNA
tgtgtgatcttgggcag

SEQ ID NO: 24110 - DNA, 17 bp, synthetic construct
  misc_feature 1..17: note = Oligonucleotide
  source 1..17: mol_type = other DNA
agctgtgtgatcttggg

SEQ ID NO: 24111 - DNA, 17 bp, synthetic construct
  misc_feature 1..17: note = Oligonucleotide
  source 1..17: mol_type = other DNA
ggcagctgtgtgatctt

SEQ ID NO: 24112 - DNA, 17 bp, synthetic construct
  misc_feature 1..17: note = Oligonucleotide
  source 1..17: mol_type = other DNA
ttgggcagctgtgtgat

SEQ ID NO: 24113 - DNA, 17 bp, synthetic construct
  misc_feature 1..17: note = Oligonucleotide
  source 1..17: mol_type = other DNA
agtttgggcagctgtgt

SEQ ID NO: 24114 - DNA, 17 bp, synthetic construct
  misc_feature 1..17: note = Oligonucleotide
  source 1..17: mol_type = other DNA
ccgagtttgggcagctg

SEQ ID NO: 24115 - DNA, 17 bp, synthetic construct
  misc_feature 1..17: note = Oligonucleotide
  source 1..17: mol_type = other DNA
aatccgagtttgggcag

SEQ ID NO: 24116 - DNA, 17 bp, synthetic construct
  misc_feature 1..17: note = Oligonucleotide
  source 1..17: mol_type = other DNA
aggaatccgagtttggg

SEQ ID NO: 24117 - DNA, 17 bp, synthetic construct
  misc_feature 1..17: note = Oligonucleotide
  source 1..17: mol_type = other DNA
gtgaggaatccgagttt

SEQ ID NO: 24118 - DNA, 17 bp, synthetic construct
  misc_feature 1..17: note = Oligonucleotide
  source 1..17: mol_type = other DNA
caggtgaggaatccgag

SEQ ID NO: 24119 - DNA, 17 bp, synthetic construct
  misc_feature 1..17: note = Oligonucleotide
  source 1..17: mol_type = other DNA
aggcaggtgaggaatcc

SEQ ID NO: 24120 - DNA, 17 bp, synthetic construct
  misc_feature 1..17: note = Oligonucleotide
  source 1..17: mol_type = other DNA
ctgaggcaggtgaggaa

SEQ ID NO: 24121 - DNA, 17 bp, synthetic construct
  misc_feature 1..17: note = Oligonucleotide
  source 1..17: mol_type = other DNA
gtcctgaggcaggtgag

SEQ ID NO: 24122 - DNA, 17 bp, synthetic construct
  misc_feature 1..17: note = Oligonucleotide
  source 1..17: mol_type = other DNA
agggtcctgaggcaggt

SEQ ID NO: 24123 - DNA, 17 bp, synthetic construct
  misc_feature 1..17: note = Oligonucleotide
  source 1..17: mol_type = other DNA
ggcagggtcctgaggca

SEQ ID NO: 24124 - DNA, 17 bp, synthetic construct
  misc_feature 1..17: note = Oligonucleotide
  source 1..17: mol_type = other DNA
attggcagggtcctgag

SEQ ID NO: 24125 - DNA, 17 bp, synthetic construct
  misc_feature 1..17: note = Oligonucleotide
  source 1..17: mol_type = other DNA
caaattggcagggtcct

SEQ ID NO: 24126 - DNA, 17 bp, synthetic construct
  misc_feature 1..17: note = Oligonucleotide
  source 1..17: mol_type = other DNA
acacaaattggcagggt

SEQ ID NO: 24127 - DNA, 17 bp, synthetic construct
  misc_feature 1..17: note = Oligonucleotide
  source 1..17: mol_type = other DNA
tgaacacaaattggcag

SEQ ID NO: 24128 - DNA, 17 bp, synthetic construct
  misc_feature 1..17: note = Oligonucleotide
  source 1..17: mol_type = other DNA
gtgtgaacacaaattgg

SEQ ID NO: 24129 - DNA, 17 bp, synthetic construct
  misc_feature 1..17: note = Oligonucleotide
  source 1..17: mol_type = other DNA
cttgtgtgaacacaaat

SEQ ID NO: 24130 - DNA, 17 bp, synthetic construct
  misc_feature 1..17: note = Oligonucleotide
  source 1..17: mol_type = other DNA
ggccttgtgtgaacaca

SEQ ID NO: 24131 - DNA, 17 bp, synthetic construct
  misc_feature 1..17: note = Oligonucleotide
  source 1..17: mol_type = other DNA
atcggccttgtgtgaac

SEQ ID NO: 24132 - DNA, 17 bp, synthetic construct
  misc_feature 1..17: note = Oligonucleotide
  source 1..17: mol_type = other DNA
aggatcggccttgtgtg

SEQ ID NO: 24133 - DNA, 17 bp, synthetic construct
  misc_feature 1..17: note = Oligonucleotide
  source 1..17: mol_type = other DNA
cccaggatcggccttgt

SEQ ID NO: 24134 - DNA, 17 bp, synthetic construct
  misc_feature 1..17: note = Oligonucleotide
  source 1..17: mol_type = other DNA
tggcccaggatcggcct

SEQ ID NO: 24135 - DNA, 17 bp, synthetic construct
  misc_feature 1..17: note = Oligonucleotide
  source 1..17: mol_type = other DNA
acttggcccaggatcgg

SEQ ID NO: 24136 - DNA, 17 bp, synthetic construct
  misc_feature 1..17: note = Oligonucleotide
  source 1..17: mol_type = other DNA
cagacttggcccaggat

SEQ ID NO: 24137 - DNA, 17 bp, synthetic construct
  misc_feature 1..17: note = Oligonucleotide
  source 1..17: mol_type = other DNA
ccccagacttggcccag

SEQ ID NO: 24138 - DNA, 17 bp, synthetic construct
  misc_feature 1..17: note = Oligonucleotide
  source 1..17: mol_type = other DNA
aagccccagacttggcc

SEQ ID NO: 24139 - DNA, 17 bp, synthetic construct
  misc_feature 1..17: note = Oligonucleotide
  source 1..17: mol_type = other DNA
accaagccccagacttg

SEQ ID NO: 24140 - DNA, 17 bp, synthetic construct
  misc_feature 1..17: note = Oligonucleotide
  source 1..17: mol_type = other DNA
ctaaccaagccccagac

SEQ ID NO: 24141 - DNA, 17 bp, synthetic construct
  misc_feature 1..17: note = Oligonucleotide
  source 1..17: mol_type = other DNA
tccctaaccaagcccca

SEQ ID NO: 24142 - DNA, 17 bp, synthetic construct
  misc_feature 1..17: note = Oligonucleotide
  source 1..17: mol_type = other DNA
cattccctaaccaagcc

SEQ ID NO: 24143 - DNA, 17 bp, synthetic construct
  misc_feature 1..17: note = Oligonucleotide
  source 1..17: mol_type = other DNA
tcacattccctaaccaa

SEQ ID NO: 24144 - DNA, 17 bp, synthetic construct
  misc_feature 1..17: note = Oligonucleotide
  source 1..17: mol_type = other DNA
acgtcacattccctaac

SEQ ID NO: 24145 - DNA, 17 bp, synthetic construct
  misc_feature 1..17: note = Oligonucleotide
  source 1..17: mol_type = other DNA
cacacgtcacattccct

SEQ ID NO: 24146 - DNA, 17 bp, synthetic construct
  misc_feature 1..17: note = Oligonucleotide
  source 1..17: mol_type = other DNA
ctgcacacgtcacattc

SEQ ID NO: 24147 - DNA, 17 bp, synthetic construct
  misc_feature 1..17: note = Oligonucleotide
  source 1..17: mol_type = other DNA
tctctgcacacgtcaca

SEQ ID NO: 24148 - DNA, 17 bp, synthetic construct
  misc_feature 1..17: note = Oligonucleotide
  source 1..17: mol_type = other DNA
agctctctgcacacgtc

SEQ ID NO: 24149 - DNA, 17 bp, synthetic construct
  misc_feature 1..17: note = Oligonucleotide
  source 1..17: mol_type = other DNA
ctgagctctctgcacac

SEQ ID NO: 24150 - DNA, 17 bp, synthetic construct
  misc_feature 1..17: note = Oligonucleotide
  source 1..17: mol_type = other DNA
ccgctgagctctctgca

SEQ ID NO: 24151 - DNA, 17 bp, synthetic construct
  misc_feature 1..17: note = Oligonucleotide
  source 1..17: mol_type = other DNA
tgcccgctgagctctct

SEQ ID NO: 24152 - DNA, 17 bp, synthetic construct
  misc_feature 1..17: note = Oligonucleotide
  source 1..17: mol_type = other DNA
atgtgcccgctgagctc

SEQ ID NO: 24153 - DNA, 17 bp, synthetic construct
  misc_feature 1..17: note = Oligonucleotide
  source 1..17: mol_type = other DNA
acaatgtgcccgctgag

SEQ ID NO: 24154 - DNA, 17 bp, synthetic construct
  misc_feature 1..17: note = Oligonucleotide
  source 1..17: mol_type = other DNA
cccacaatgtgcccgct

SEQ ID NO: 24155 - DNA, 17 bp, synthetic construct
  misc_feature 1..17: note = Oligonucleotide
  source 1..17: mol_type = other DNA
gcacccacaatgtgccc

SEQ ID NO: 24156 - DNA, 17 bp, synthetic construct
  misc_feature 1..17: note = Oligonucleotide
  source 1..17: mol_type = other DNA
ctggcacccacaatgtg

SEQ ID NO: 24157 - DNA, 17 bp, synthetic construct
  misc_feature 1..17: note = Oligonucleotide
  source 1..17: mol_type = other DNA
gccctggcacccacaat

SEQ ID NO: 24158 - DNA, 17 bp, synthetic construct
  misc_feature 1..17: note = Oligonucleotide
  source 1..17: mol_type = other DNA
tgagccctggcacccac

SEQ ID NO: 24159 - DNA, 17 bp, synthetic construct
  misc_feature 1..17: note = Oligonucleotide
  source 1..17: mol_type = other DNA
ccgtgagccctggcacc

SEQ ID NO: 24160 - DNA, 17 bp, synthetic construct
  misc_feature 1..17: note = Oligonucleotide
  source 1..17: mol_type = other DNA
ggtccgtgagccctggc

SEQ ID NO: 24161 - DNA, 17 bp, synthetic construct
  misc_feature 1..17: note = Oligonucleotide
  source 1..17: mol_type = other DNA
attggtccgtgagccct

SEQ ID NO: 24162 - DNA, 17 bp, synthetic construct
  misc_feature 1..17: note = Oligonucleotide
  source 1..17: mol_type = other DNA
tccattggtccgtgagc

SEQ ID NO: 24163 - DNA, 17 bp, synthetic construct
  misc_feature 1..17: note = Oligonucleotide
  source 1..17: mol_type = other DNA
ggctccattggtccgtg

SEQ ID NO: 24164 - DNA, 17 bp, synthetic construct
  misc_feature 1..17: note = Oligonucleotide
  source 1..17: mol_type = other DNA
gtgggctccattggtcc

SEQ ID NO: 24165 - DNA, 17 bp, synthetic construct
  misc_feature 1..17: note = Oligonucleotide
  source 1..17: mol_type = other DNA
ccagtgggctccattgg

SEQ ID NO: 24166 - DNA, 17 bp, synthetic construct
  misc_feature 1..17: note = Oligonucleotide
  source 1..17: mol_type = other DNA
cccccagtgggctccat

SEQ ID NO: 24167 - DNA, 17 bp, synthetic construct
  misc_feature 1..17: note = Oligonucleotide
  source 1..17: mol_type = other DNA
agccccccagtgggctc

SEQ ID NO: 24168 - DNA, 17 bp, synthetic construct
  misc_feature 1..17: note = Oligonucleotide
  source 1..17: mol_type = other DNA
tggagccccccagtggg

SEQ ID NO: 24169 - DNA, 17 bp, synthetic construct
  misc_feature 1..17: note = Oligonucleotide
  source 1..17: mol_type = other DNA
gcttggagccccccagt

SEQ ID NO: 24170 - DNA, 17 bp, synthetic construct
  misc_feature 1..17: note = Oligonucleotide
  source 1..17: mol_type = other DNA
tgtgcttggagcccccc

SEQ ID NO: 24171 - DNA, 17 bp, synthetic construct
  misc_feature 1..17: note = Oligonucleotide
  source 1..17: mol_type = other DNA
aggtgtgcttggagccc

SEQ ID NO: 24172 - DNA, 17 bp, synthetic construct
  misc_feature 1..17: note = Oligonucleotide
  source 1..17: mol_type = other DNA
accaggtgtgcttggag

SEQ ID NO: 24173 - DNA, 17 bp, synthetic construct
  misc_feature 1..17: note = Oligonucleotide
  source 1..17: mol_type = other DNA
gacaccaggtgtgcttg

SEQ ID NO: 24174 - DNA, 17 bp, synthetic construct
  misc_feature 1..17: note = Oligonucleotide
  source 1..17: mol_type = other DNA
tgtgacaccaggtgtgc

SEQ ID NO: 24175 - DNA, 17 bp, synthetic construct
  misc_feature 1..17: note = Oligonucleotide
  source 1..17: mol_type = other DNA
ttctgtgacaccaggtg

SEQ ID NO: 24176 - DNA, 17 bp, synthetic construct
  misc_feature 1..17: note = Oligonucleotide
  source 1..17: mol_type = other DNA
gccttctgtgacaccag

SEQ ID NO: 24177 - DNA, 17 bp, synthetic construct
  misc_feature 1..17: note = Oligonucleotide
  source 1..17: mol_type = other DNA
acagccttctgtgacac

SEQ ID NO: 24178 - DNA, 17 bp, synthetic construct
  misc_feature 1..17: note = Oligonucleotide
  source 1..17: mol_type = other DNA
cacacagccttctgtga

SEQ ID NO: 24179 - DNA, 17 bp, synthetic construct
  misc_feature 1..17: note = Oligonucleotide
  source 1..17: mol_type = other DNA
acacacacagccttctg

SEQ ID NO: 24180 - DNA, 17 bp, synthetic construct
  misc_feature 1..17: note = Oligonucleotide
  source 1..17: mol_type = other DNA
ccgacacacacagcctt

SEQ ID NO: 24181 - DNA, 17 bp, synthetic construct
  misc_feature 1..17: note = Oligonucleotide
  source 1..17: mol_type = other DNA
accccgacacacacagc

SEQ ID NO: 24182 - DNA, 17 bp, synthetic construct
  misc_feature 1..17: note = Oligonucleotide
  source 1..17: mol_type = other DNA
cccaccccgacacacac

SEQ ID NO: 24183 - DNA, 17 bp, synthetic construct
  misc_feature 1..17: note = Oligonucleotide
  source 1..17: mol_type = other DNA
acccccaccccgacaca

SEQ ID NO: 24184 - DNA, 17 bp, synthetic construct
  misc_feature 1..17: note = Oligonucleotide
  source 1..17: mol_type = other DNA
agtacccccaccccgac

SEQ ID NO: 24185 - DNA, 17 bp, synthetic construct
  misc_feature 1..17: note = Oligonucleotide
  source 1..17: mol_type = other DNA
aaaagtacccccacccc

SEQ ID NO: 24186 - DNA, 17 bp, synthetic construct
  misc_feature 1..17: note = Oligonucleotide
  source 1..17: mol_type = other DNA
ctcaaaagtacccccac

SEQ ID NO: 24187 - DNA, 17 bp, synthetic construct
  misc_feature 1..17: note = Oligonucleotide
  source 1..17: mol_type = other DNA
tagctcaaaagtacccc

SEQ ID NO: 24188 - DNA, 17 bp, synthetic construct
  misc_feature 1..17: note = Oligonucleotide
  source 1..17: mol_type = other DNA
tcttagctcaaaagtac

SEQ ID NO: 24189 - DNA, 17 bp, synthetic construct
  misc_feature 1..17: note = Oligonucleotide
  source 1..17: mol_type = other DNA
acatcttagctcaaaag

SEQ ID NO: 24190 - DNA, 17 bp, synthetic construct
  misc_feature 1..17: note = Oligonucleotide
  source 1..17: mol_type = other DNA
tgcacatcttagctcaa

SEQ ID NO: 24191 - DNA, 17 bp, synthetic construct
  misc_feature 1..17: note = Oligonucleotide
  source 1..17: mol_type = other DNA
tcttgcacatcttagct

SEQ ID NO: 24192 - DNA, 17 bp, synthetic construct
  misc_feature 1..17: note = Oligonucleotide
  source 1..17: mol_type = other DNA
ttatcttgcacatctta

SEQ ID NO: 24193 - DNA, 17 bp, synthetic construct
  misc_feature 1..17: note = Oligonucleotide
  source 1..17: mol_type = other DNA
catttatcttgcacatc

SEQ ID NO: 24194 - DNA, 17 bp, synthetic construct
  misc_feature 1..17: note = Oligonucleotide
  source 1..17: mol_type = other DNA
tcccatttatcttgcac

SEQ ID NO: 24195 - DNA, 17 bp, synthetic construct
  misc_feature 1..17: note = Oligonucleotide
  source 1..17: mol_type = other DNA
aactcccatttatcttg

SEQ ID NO: 24196 - DNA, 17 bp, synthetic construct
  misc_feature 1..17: note = Oligonucleotide
  source 1..17: mol_type = other DNA
agaaactcccatttatc

SEQ ID NO: 24197 - DNA, 17 bp, synthetic construct
  misc_feature 1..17: note = Oligonucleotide
  source 1..17: mol_type = other DNA
cccagaaactcccattt

SEQ ID NO: 24198 - DNA, 17 bp, synthetic construct
  misc_feature 1..17: note = Oligonucleotide
  source 1..17: mol_type = other DNA
tcgcccagaaactccca

SEQ ID NO: 24199 - DNA, 17 bp, synthetic construct
  misc_feature 1..17: note = Oligonucleotide
  source 1..17: mol_type = other DNA
ttatcgcccagaaactc

SEQ ID NO: 24200 - DNA, 17 bp, synthetic construct
  misc_feature 1..17: note = Oligonucleotide
  source 1..17: mol_type = other DNA
ccattatcgcccagaaa

SEQ ID NO: 24201 - DNA, 17 bp, synthetic construct
  misc_feature 1..17: note = Oligonucleotide
  source 1..17: mol_type = other DNA
accccattatcgcccag

SEQ ID NO: 24202 - DNA, 17 bp, synthetic construct
  misc_feature 1..17: note = Oligonucleotide
  source 1..17: mol_type = other DNA
ttcaccccattatcgcc

SEQ ID NO: 24203 - DNA, 17 bp, synthetic construct
  misc_feature 1..17: note = Oligonucleotide
  source 1..17: mol_type = other DNA
cagttcaccccattatc

SEQ ID NO: 24204 - DNA, 17 bp, synthetic construct
  misc_feature 1..17: note = Oligonucleotide
  source 1..17: mol_type = other DNA
tgtcagttcaccccatt

SEQ ID NO: 24205 - DNA, 17 bp, synthetic construct
  misc_feature 1..17: note = Oligonucleotide
  source 1..17: mol_type = other DNA
ctctgtcagttcacccc

SEQ ID NO: 24206 - DNA, 17 bp, synthetic construct
  misc_feature 1..17: note = Oligonucleotide
  source 1..17: mol_type = other DNA
ctgctctgtcagttcac

SEQ ID NO: 24207 - DNA, 17 bp, synthetic construct
  misc_feature 1..17: note = Oligonucleotide
  source 1..17: mol_type = other DNA
acactgctctgtcagtt

SEQ ID NO: 24208 - DNA, 17 bp, synthetic construct
  misc_feature 1..17: note = Oligonucleotide
  source 1..17: mol_type = other DNA
tccacactgctctgtca

SEQ ID NO: 24209 - DNA, 17 bp, synthetic construct
  misc_feature 1..17: note = Oligonucleotide
  source 1..17: mol_type = other DNA
ttttccacactgctctg

SEQ ID NO: 24210 - DNA, 17 bp, synthetic construct
  misc_feature 1..17: note = Oligonucleotide
  source 1..17: mol_type = other DNA
gccttttccacactgct

SEQ ID NO: 24211 - DNA, 17 bp, synthetic construct
  misc_feature 1..17: note = Oligonucleotide
  source 1..17: mol_type = other DNA
tatgccttttccacact

SEQ ID NO: 24212 - DNA, 17 bp, synthetic construct
  misc_feature 1..17: note = Oligonucleotide
  source 1..17: mol_type = other DNA
ccatatgccttttccac

SEQ ID NO: 24213 - DNA, 17 bp, synthetic construct
  misc_feature 1..17: note = Oligonucleotide
  source 1..17: mol_type = other DNA
cacccatatgccttttc

SEQ ID NO: 24214 - DNA, 17 bp, synthetic construct
  misc_feature 1..17: note = Oligonucleotide
  source 1..17: mol_type = other DNA
acacacccatatgcctt

SEQ ID NO: 24215 - DNA, 17 bp, synthetic construct
  misc_feature 1..17: note = Oligonucleotide
  source 1..17: mol_type = other DNA
gtcacacacccatatgc

SEQ ID NO: 24216 - DNA, 17 bp, synthetic construct
  misc_feature 1..17: note = Oligonucleotide
  source 1..17: mol_type = other DNA
caggtcacacacccata

SEQ ID NO: 24217 - DNA, 17 bp, synthetic construct
  misc_feature 1..17: note = Oligonucleotide
  source 1..17: mol_type = other DNA
gaccaggtcacacaccc

SEQ ID NO: 24218 - DNA, 17 bp, synthetic construct
  misc_feature 1..17: note = Oligonucleotide
  source 1..17: mol_type = other DNA
agggaccaggtcacaca

SEQ ID NO: 24219 - DNA, 17 bp, synthetic construct
  misc_feature 1..17: note = Oligonucleotide
  source 1..17: mol_type = other DNA
ctgagggaccaggtcac

SEQ ID NO: 24220 - DNA, 17 bp, synthetic construct
  misc_feature 1..17: note = Oligonucleotide
  source 1..17: mol_type = other DNA
tctctgagggaccaggt

SEQ ID NO: 24221 - DNA, 17 bp, synthetic construct
  misc_feature 1..17: note = Oligonucleotide
  source 1..17: mol_type = other DNA
cagtctctgagggacca

SEQ ID NO: 24222 - DNA, 17 bp, synthetic construct
  misc_feature 1..17: note = Oligonucleotide
  source 1..17: mol_type = other DNA
tggcagtctctgaggga

SEQ ID NO: 24223 - DNA, 17 bp, synthetic construct
  misc_feature 1..17: note = Oligonucleotide
  source 1..17: mol_type = other DNA
tcttggcagtctctgag

SEQ ID NO: 24224 - DNA, 17 bp, synthetic construct
  misc_feature 1..17: note = Oligonucleotide
  source 1..17: mol_type = other DNA
aactcttggcagtctct

SEQ ID NO: 24225 - DNA, 17 bp, synthetic construct
  misc_feature 1..17: note = Oligonucleotide
  source 1..17: mol_type = other DNA
aataactcttggcagtc

SEQ ID NO: 24226 - DNA, 17 bp, synthetic construct
  misc_feature 1..17: note = Oligonucleotide
  source 1..17: mol_type = other DNA
agaaataactcttggca

SEQ ID NO: 24227 - DNA, 17 bp, synthetic construct
  misc_feature 1..17: note = Oligonucleotide
  source 1..17: mol_type = other DNA
tacagaaataactcttg

SEQ ID NO: 24228 - DNA, 17 bp, synthetic construct
  misc_feature 1..17: note = Oligonucleotide
  source 1..17: mol_type = other DNA
acctacagaaataactc

SEQ ID NO: 24229 - DNA, 17 bp, synthetic construct
  misc_feature 1..17: note = Oligonucleotide
  source 1..17: mol_type = other DNA
cccacctacagaaataa

SEQ ID NO: 24230 - DNA, 17 bp, synthetic construct
  misc_feature 1..17: note = Oligonucleotide
  source 1..17: mol_type = other DNA
aatcccacctacagaaa

SEQ ID NO: 24231 - DNA, 17 bp, synthetic construct
  misc_feature 1..17: note = Oligonucleotide
  source 1..17: mol_type = other DNA
cacaatcccacctacag

SEQ ID NO: 24232 - DNA, 17 bp, synthetic construct
  misc_feature 1..17: note = Oligonucleotide
  source 1..17: mol_type = other DNA
ccccacaatcccaccta

SEQ ID NO: 24233 - DNA, 17 bp, synthetic construct
  misc_feature 1..17: note = Oligonucleotide
  source 1..17: mol_type = other DNA
cttccccacaatcccac

SEQ ID NO: 24234 - DNA, 17 bp, synthetic construct
  misc_feature 1..17: note = Oligonucleotide
  source 1..17: mol_type = other DNA
cttcttccccacaatcc

SEQ ID NO: 24235 - DNA, 17 bp, synthetic construct
  misc_feature 1..17: note = Oligonucleotide
  source 1..17: mol_type = other DNA
agccttcttccccacaa

SEQ ID NO: 24236 - DNA, 17 bp, synthetic construct
  misc_feature 1..17: note = Oligonucleotide
  source 1..17: mol_type = other DNA
accagccttcttcccca

SEQ ID NO: 24237 - DNA, 17 bp, synthetic construct
  misc_feature 1..17: note = Oligonucleotide
  source 1..17: mol_type = other DNA
ctcaccagccttcttcc

SEQ ID NO: 24238 - DNA, 17 bp, synthetic construct
  misc_feature 1..17: note = Oligonucleotide
  source 1..17: mol_type = other DNA
agcctcaccagccttct

SEQ ID NO: 24239 - DNA, 17 bp, synthetic construct
  misc_feature 1..17: note = Oligonucleotide
  source 1..17: mol_type = other DNA
tgcagcctcaccagcct

SEQ ID NO: 24240 - DNA, 17 bp, synthetic construct
  misc_feature 1..17: note = Oligonucleotide
  source 1..17: mol_type = other DNA
agctgcagcctcaccag

SEQ ID NO: 24241 - DNA, 17 bp, synthetic construct
  misc_feature 1..17: note = Oligonucleotide
  source 1..17: mol_type = other DNA
agtagctgcagcctcac

SEQ ID NO: 24242 - DNA, 17 bp, synthetic construct
  misc_feature 1..17: note = Oligonucleotide
  source 1..17: mol_type = other DNA
caaagtagctgcagcct

SEQ ID NO: 24243 - DNA, 17 bp, synthetic construct
  misc_feature 1..17: note = Oligonucleotide
  source 1..17: mol_type = other DNA
ctccaaagtagctgcag

SEQ ID NO: 24244 - DNA, 17 bp, synthetic construct
  misc_feature 1..17: note = Oligonucleotide
  source 1..17: mol_type = other DNA
cagctccaaagtagctg

SEQ ID NO: 24245 - DNA, 17 bp, synthetic construct
  misc_feature 1..17: note = Oligonucleotide
  source 1..17: mol_type = other DNA
tctcagctccaaagtag

SEQ ID NO: 24246 - DNA, 17 bp, synthetic construct
  misc_feature 1..17: note = Oligonucleotide
  source 1..17: mol_type = other DNA
gcttctcagctccaaag

SEQ ID NO: 24247 - DNA, 17 bp, synthetic construct
  misc_feature 1..17: note = Oligonucleotide
  source 1..17: mol_type = other DNA
agcgcttctcagctcca

SEQ ID NO: 24248 - DNA, 17 bp, synthetic construct
  misc_feature 1..17: note = Oligonucleotide
  source 1..17: mol_type = other DNA
gagagcgcttctcagct

SEQ ID NO: 24249 - DNA, 17 bp, synthetic construct
  misc_feature 1..17: note = Oligonucleotide
  source 1..17: mol_type = other DNA
ggggagagcgcttctca

SEQ ID NO: 24250 - DNA, 17 bp, synthetic construct
  misc_feature 1..17: note = Oligonucleotide
  source 1..17: mol_type = other DNA
gcaggggagagcgcttc

SEQ ID NO: 24251 - DNA, 17 bp, synthetic construct
  misc_feature 1..17: note = Oligonucleotide
  source 1..17: mol_type = other DNA
agagcaggggagagcgc

SEQ ID NO: 24252 - DNA, 17 bp, synthetic construct
  misc_feature 1..17: note = Oligonucleotide
  source 1..17: mol_type = other DNA
gggagagcaggggagag

SEQ ID NO: 24253 - DNA, 17 bp, synthetic construct
  misc_feature 1..17: note = Oligonucleotide
  source 1..17: mol_type = other DNA
ccagggagagcagggga

SEQ ID NO: 24254 - DNA, 17 bp, synthetic construct
  misc_feature 1..17: note = Oligonucleotide
  source 1..17: mol_type = other DNA
aggccagggagagcagg

SEQ ID NO: 24255 - DNA, 17 bp, synthetic construct
  misc_feature 1..17: note = Oligonucleotide
  source 1..17: mol_type = other DNA
tttaggccagggagagc

SEQ ID NO: 24256 - DNA, 17 bp, synthetic construct
  misc_feature 1..17: note = Oligonucleotide
  source 1..17: mol_type = other DNA
gtgtttaggccagggag

SEQ ID NO: 24257 - DNA, 17 bp, synthetic construct
  misc_feature 1..17: note = Oligonucleotide
  source 1..17: mol_type = other DNA
tcagtgtttaggccagg

SEQ ID NO: 24258 - DNA, 17 bp, synthetic construct
  misc_feature 1..17: note = Oligonucleotide
  source 1..17: mol_type = other DNA
cactcagtgtttaggcc

SEQ ID NO: 24259 - DNA, 17 bp, synthetic construct
  misc_feature 1..17: note = Oligonucleotide
  source 1..17: mol_type = other DNA
agacactcagtgtttag

SEQ ID NO: 24260 - DNA, 17 bp, synthetic construct
  misc_feature 1..17: note = Oligonucleotide
  source 1..17: mol_type = other DNA
ggaagacactcagtgtt

SEQ ID NO: 24261 - DNA, 17 bp, synthetic construct
  misc_feature 1..17: note = Oligonucleotide
  source 1..17: mol_type = other DNA
catggaagacactcagt

SEQ ID NO: 24262 - DNA, 17 bp, synthetic construct
  misc_feature 1..17: note = Oligonucleotide
  source 1..17: mol_type = other DNA
aaccatggaagacactc

SEQ ID NO: 24263 - DNA, 17 bp, synthetic construct
  misc_feature 1..17: note = Oligonucleotide
  source 1..17: mol_type = other DNA
agaaaccatggaagaca

SEQ ID NO: 24264 - DNA, 17 bp, synthetic construct
  misc_feature 1..17: note = Oligonucleotide
  source 1..17: mol_type = other DNA
gaaagaaaccatggaag

SEQ ID NO: 24265 - DNA, 17 bp, synthetic construct
  misc_feature 1..17: note = Oligonucleotide
  source 1..17: mol_type = other DNA
taagaaagaaaccatgg

SEQ ID NO: 24266 - DNA, 17 bp, synthetic construct
  misc_feature 1..17: note = Oligonucleotide
  source 1..17: mol_type = other DNA
ggataagaaagaaacca

SEQ ID NO: 24267 - DNA, 17 bp, synthetic construct
  misc_feature 1..17: note = Oligonucleotide
  source 1..17: mol_type = other DNA
agaggataagaaagaaa

SEQ ID NO: 24268 - DNA, 17 bp, synthetic construct
  misc_feature 1..17: note = Oligonucleotide
  source 1..17: mol_type = other DNA
ggcagaggataagaaag

SEQ ID NO: 24269 - DNA, 17 bp, synthetic construct
  misc_feature 1..17: note = Oligonucleotide
  source 1..17: mol_type = other DNA
tgaggcagaggataaga

SEQ ID NO: 24270 - DNA, 17 bp, synthetic construct
  misc_feature 1..17: note = Oligonucleotide
  source 1..17: mol_type = other DNA
aggtgaggcagaggata

SEQ ID NO: 24271 - DNA, 17 bp, synthetic construct
  misc_feature 1..17: note = Oligonucleotide
  source 1..17: mol_type = other DNA
atcaggtgaggcagagg

SEQ ID NO: 24272 - DNA, 17 bp, synthetic construct
  misc_feature 1..17: note = Oligonucleotide
  source 1..17: mol_type = other DNA
cacatcaggtgaggcag

SEQ ID NO: 24273 - DNA, 17 bp, synthetic construct
  misc_feature 1..17: note = Oligonucleotide
  source 1..17: mol_type = other DNA
cgacacatcaggtgagg

SEQ ID NO: 24274 - DNA, 17 bp, synthetic construct
  misc_feature 1..17: note = Oligonucleotide
  source 1..17: mol_type = other DNA
ccccgacacatcaggtg

SEQ ID NO: 24275 - DNA, 17 bp, synthetic construct
  misc_feature 1..17: note = Oligonucleotide
  source 1..17: mol_type = other DNA
ccaccccgacacatcag

SEQ ID NO: 24276 - DNA, 17 bp, synthetic construct
  misc_feature 1..17: note = Oligonucleotide
  source 1..17: mol_type = other DNA
cacccaccccgacacat

SEQ ID NO: 24277 - DNA, 17 bp, synthetic construct
  misc_feature 1..17: note = Oligonucleotide
  source 1..17: mol_type = other DNA
ggccacccaccccgaca

SEQ ID NO: 24278 - DNA, 17 bp, synthetic construct
  misc_feature 1..17: note = Oligonucleotide
  source 1..17: mol_type = other DNA
tgaggccacccaccccg

SEQ ID NO: 24279 - DNA, 17 bp, synthetic construct
  misc_feature 1..17: note = Oligonucleotide
  source 1..17: mol_type = other DNA
ctgtgaggccacccacc

SEQ ID NO: 24280 - DNA, 17 bp, synthetic construct
  misc_feature 1..17: note = Oligonucleotide
  source 1..17: mol_type = other DNA
gggctgtgaggccaccc

SEQ ID NO: 24281 - DNA, 17 bp, synthetic construct
  misc_feature 1..17: note = Oligonucleotide
  source 1..17: mol_type = other DNA
gcagggctgtgaggcca

SEQ ID NO: 24282 - DNA, 17 bp, synthetic construct
  misc_feature 1..17: note = Oligonucleotide
  source 1..17: mol_type = other DNA
agggcagggctgtgagg

SEQ ID NO: 24283 - DNA, 17 bp, synthetic construct
  misc_feature 1..17: note = Oligonucleotide
  source 1..17: mol_type = other DNA
tgcagggcagggctgtg

SEQ ID NO: 24284 - DNA, 17 bp, synthetic construct
  misc_feature 1..17: note = Oligonucleotide
  source 1..17: mol_type = other DNA
ctgtgcagggcagggct

SEQ ID NO: 24285 - DNA, 17 bp, synthetic construct
  misc_feature 1..17: note = Oligonucleotide
  source 1..17: mol_type = other DNA
gacctgtgcagggcagg

SEQ ID NO: 24286 - DNA, 17 bp, synthetic construct
  misc_feature 1..17: note = Oligonucleotide
  source 1..17: mol_type = other DNA
tgagacctgtgcagggc

SEQ ID NO: 24287 - DNA, 17 bp, synthetic construct
  misc_feature 1..17: note = Oligonucleotide
  source 1..17: mol_type = other DNA
tgatgagacctgtgcag

SEQ ID NO: 24288 - DNA, 17 bp, synthetic construct
  misc_feature 1..17: note = Oligonucleotide
  source 1..17: mol_type = other DNA
aggtgatgagacctgtg

SEQ ID NO: 24289 - DNA, 17 bp, synthetic construct
  misc_feature 1..17: note = Oligonucleotide
  source 1..17: mol_type = other DNA
gcaaggtgatgagacct

SEQ ID NO: 24290 - DNA, 17 bp, synthetic construct
  misc_feature 1..17: note = Oligonucleotide
  source 1..17: mol_type = other DNA
gctgcaaggtgatgaga

SEQ ID NO: 24291 - DNA, 17 bp, synthetic construct
  misc_feature 1..17: note = Oligonucleotide
  source 1..17: mol_type = other DNA
ccagctgcaaggtgatg

SEQ ID NO: 24292 - DNA, 17 bp, synthetic construct
  misc_feature 1..17: note = Oligonucleotide
  source 1..17: mol_type = other DNA
ggtccagctgcaaggtg

SEQ ID NO: 24293 - DNA, 17 bp, synthetic construct
  misc_feature 1..17: note = Oligonucleotide
  source 1..17: mol_type = other DNA
catggtccagctgcaag

SEQ ID NO: 24294 - DNA, 17 bp, synthetic construct
  misc_feature 1..17: note = Oligonucleotide
  source 1..17: mol_type = other DNA
agccatggtccagctgc

SEQ ID NO: 24295 - DNA, 17 bp, synthetic construct
  misc_feature 1..17: note = Oligonucleotide
  source 1..17: mol_type = other DNA
caaagccatggtccagc

SEQ ID NO: 24296 - DNA, 17 bp, synthetic construct
  misc_feature 1..17: note = Oligonucleotide
  source 1..17: mol_type = other DNA
gaacaaagccatggtcc

SEQ ID NO: 24297 - DNA, 17 bp, synthetic construct
  misc_feature 1..17: note = Oligonucleotide
  source 1..17: mol_type = other DNA
tgagaacaaagccatgg

SEQ ID NO: 24298 - DNA, 17 bp, synthetic construct
  misc_feature 1..17: note = Oligonucleotide
  source 1..17: mol_type = other DNA
tcatgagaacaaagcca

SEQ ID NO: 24299 - DNA, 17 bp, synthetic construct
  misc_feature 1..17: note = Oligonucleotide
  source 1..17: mol_type = other DNA
cagtcatgagaacaaag

SEQ ID NO: 24300 - DNA, 17 bp, synthetic construct
  misc_feature 1..17: note = Oligonucleotide
  source 1..17: mol_type = other DNA
aggcagtcatgagaaca

SEQ ID NO: 24301 - DNA, 17 bp, synthetic construct
  misc_feature 1..17: note = Oligonucleotide
  source 1..17: mol_type = other DNA
ggcaggcagtcatgaga

SEQ ID NO: 24302 - DNA, 17 bp, synthetic construct
  misc_feature 1..17: note = Oligonucleotide
  source 1..17: mol_type = other DNA
cagggcaggcagtcatg

SEQ ID NO: 24303 - DNA, 17 bp, synthetic construct
  misc_feature 1..17: note = Oligonucleotide
  source 1..17: mol_type = other DNA
agccagggcaggcagtc

SEQ ID NO: 24304 - DNA, 17 bp, synthetic construct
  misc_feature 1..17: note = Oligonucleotide
  source 1..17: mol_type = other DNA
cagagccagggcaggca

SEQ ID NO: 24305 - DNA, 17 bp, synthetic construct
  misc_feature 1..17: note = Oligonucleotide
  source 1..17: mol_type = other DNA
gggcagagccagggcag

SEQ ID NO: 24306 - DNA, 17 bp, synthetic construct
  misc_feature 1..17: note = Oligonucleotide
  source 1..17: mol_type = other DNA
agagggcagagccaggg

SEQ ID NO: 24307 - DNA, 17 bp, synthetic construct
  misc_feature 1..17: note = Oligonucleotide
  source 1..17: mol_type = other DNA
accagagggcagagcca

SEQ ID NO: 24308 - DNA, 17 bp, synthetic construct
  misc_feature 1..17: note = Oligonucleotide
  source 1..17: mol_type = other DNA
tggaccagagggcagag

SEQ ID NO: 24309 - DNA, 17 bp, synthetic construct
  misc_feature 1..17: note = Oligonucleotide
  source 1..17: mol_type = other DNA
ggatggaccagagggca

SEQ ID NO: 24310 - DNA, 17 bp, synthetic construct
  misc_feature 1..17: note = Oligonucleotide
  source 1..17: mol_type = other DNA
gagggatggaccagagg

SEQ ID NO: 24311 - DNA, 17 bp, synthetic construct
  misc_feature 1..17: note = Oligonucleotide
  source 1..17: mol_type = other DNA
ccagagggatggaccag

SEQ ID NO: 24312 - DNA, 17 bp, synthetic construct
  misc_feature 1..17: note = Oligonucleotide
  source 1..17: mol_type = other DNA
tggccagagggatggac

SEQ ID NO: 24313 - DNA, 17 bp, synthetic construct
  misc_feature 1..17: note = Oligonucleotide
  source 1..17: mol_type = other DNA
atttggccagagggatg

SEQ ID NO: 24314 - DNA, 17 bp, synthetic construct
  misc_feature 1..17: note = Oligonucleotide
  source 1..17: mol_type = other DNA
ctgatttggccagaggg

SEQ ID NO: 24315 - DNA, 17 bp, synthetic construct
  misc_feature 1..17: note = Oligonucleotide
  source 1..17: mol_type = other DNA
agcctgatttggccaga

SEQ ID NO: 24316 - DNA, 17 bp, synthetic construct
  misc_feature 1..17: note = Oligonucleotide
  source 1..17: mol_type = other DNA
gaaagcctgatttggcc

SEQ ID NO: 24317 - DNA, 17 bp, synthetic construct
  misc_feature 1..17: note = Oligonucleotide
  source 1..17: mol_type = other DNA
gcggaaagcctgatttg

SEQ ID NO: 24318 - DNA, 17 bp, synthetic construct
  misc_feature 1..17: note = Oligonucleotide
  source 1..17: mol_type = other DNA
tctgcggaaagcctgat

SEQ ID NO: 24319 - DNA, 17 bp, synthetic construct
  misc_feature 1..17: note = Oligonucleotide
  source 1..17: mol_type = other DNA
agctctgcggaaagcct

SEQ ID NO: 24320 - DNA, 17 bp, synthetic construct
  misc_feature 1..17: note = Oligonucleotide
  source 1..17: mol_type = other DNA
agcagctctgcggaaag

SEQ ID NO: 24321 - DNA, 17 bp, synthetic construct
  misc_feature 1..17: note = Oligonucleotide
  source 1..17: mol_type = other DNA
gatagcagctctgcgga

SEQ ID NO: 24322 - DNA, 17 bp, synthetic construct
  misc_feature 1..17: note = Oligonucleotide
  source 1..17: mol_type = other DNA
ggtgatagcagctctgc

SEQ ID NO: 24323 - DNA, 17 bp, synthetic construct
  misc_feature 1..17: note = Oligonucleotide
  source 1..17: mol_type = other DNA
tggggtgatagcagctc

SEQ ID NO: 24324 - DNA, 17 bp, synthetic construct
  misc_feature 1..17: note = Oligonucleotide
  source 1..17: mol_type = other DNA
atatggggtgatagcag

SEQ ID NO: 24325 - DNA, 17 bp, synthetic construct
  misc_feature 1..17: note = Oligonucleotide
  source 1..17: mol_type = other DNA
cggatatggggtgatag

SEQ ID NO: 24326 - DNA, 17 bp, synthetic construct
  misc_feature 1..17: note = Oligonucleotide
  source 1..17: mol_type = other DNA
ggacggatatggggtga

SEQ ID NO: 24327 - DNA, 17 bp, synthetic construct
  misc_feature 1..17: note = Oligonucleotide
  source 1..17: mol_type = other DNA
gctggacggatatgggg

SEQ ID NO: 24328 - DNA, 17 bp, synthetic construct
  misc_feature 1..17: note = Oligonucleotide
  source 1..17: mol_type = other DNA
caagctggacggatatg

SEQ ID NO: 24329 - DNA, 17 bp, synthetic construct
  misc_feature 1..17: note = Oligonucleotide
  source 1..17: mol_type = other DNA
ggtcaagctggacggat

SEQ ID NO: 24330 - DNA, 17 bp, synthetic construct
  misc_feature 1..17: note = Oligonucleotide
  source 1..17: mol_type = other DNA
gagggtcaagctggacg

SEQ ID NO: 24331 - DNA, 17 bp, synthetic construct
  misc_feature 1..17: note = Oligonucleotide
  source 1..17: mol_type = other DNA
acagagggtcaagctgg

SEQ ID NO: 24332 - DNA, 17 bp, synthetic construct
  misc_feature 1..17: note = Oligonucleotide
  source 1..17: mol_type = other DNA
tgcacagagggtcaagc

SEQ ID NO: 24333 - DNA, 17 bp, synthetic construct
  misc_feature 1..17: note = Oligonucleotide
  source 1..17: mol_type = other DNA
gagtgcacagagggtca

SEQ ID NO: 24334 - DNA, 17 bp, synthetic construct
  misc_feature 1..17: note = Oligonucleotide
  source 1..17: mol_type = other DNA
gaggagtgcacagaggg

SEQ ID NO: 24335 - DNA, 17 bp, synthetic construct
  misc_feature 1..17: note = Oligonucleotide
  source 1..17: mol_type = other DNA
aatgaggagtgcacaga

SEQ ID NO: 24336 - DNA, 17 bp, synthetic construct
  misc_feature 1..17: note = Oligonucleotide
  source 1..17: mol_type = other DNA
ggcaatgaggagtgcac

SEQ ID NO: 24337 - DNA, 17 bp, synthetic construct
  misc_feature 1..17: note = Oligonucleotide
  source 1..17: mol_type = other DNA
tgaggcaatgaggagtg

SEQ ID NO: 24338 - DNA, 17 bp, synthetic construct
  misc_feature 1..17: note = Oligonucleotide
  source 1..17: mol_type = other DNA
ccctgaggcaatgagga

SEQ ID NO: 24339 - DNA, 17 bp, synthetic construct
  misc_feature 1..17: note = Oligonucleotide
  source 1..17: mol_type = other DNA
gggccctgaggcaatga

SEQ ID NO: 24340 - DNA, 17 bp, synthetic construct
  misc_feature 1..17: note = Oligonucleotide
  source 1..17: mol_type = other DNA
ccagggccctgaggcaa

SEQ ID NO: 24341 - DNA, 17 bp, synthetic construct
  misc_feature 1..17: note = Oligonucleotide
  source 1..17: mol_type = other DNA
tctccagggccctgagg

SEQ ID NO: 24342 - DNA, 17 bp, synthetic construct
  misc_feature 1..17: note = Oligonucleotide
  source 1..17: mol_type = other DNA
cgatctccagggccctg

SEQ ID NO: 24343 - DNA, 17 bp, synthetic construct
  misc_feature 1..17: note = Oligonucleotide
  source 1..17: mol_type = other DNA
ggccgatctccagggcc

SEQ ID NO: 24344 - DNA, 17 bp, synthetic construct
  misc_feature 1..17: note = Oligonucleotide
  source 1..17: mol_type = other DNA
tggggccgatctccagg

SEQ ID NO: 24345 - DNA, 17 bp, synthetic construct
  misc_feature 1..17: note = Oligonucleotide
  source 1..17: mol_type = other DNA
cactggggccgatctcc

SEQ ID NO: 24346 - DNA, 17 bp, synthetic construct
  misc_feature 1..17: note = Oligonucleotide
  source 1..17: mol_type = other DNA
gagcactggggccgatc

SEQ ID NO: 24347 - DNA, 17 bp, synthetic construct
  misc_feature 1..17: note = Oligonucleotide
  source 1..17: mol_type = other DNA
ggagagcactggggccg

SEQ ID NO: 24348 - DNA, 17 bp, synthetic construct
  misc_feature 1..17: note = Oligonucleotide
  source 1..17: mol_type = other DNA
gcaggagagcactgggg

SEQ ID NO: 24349 - DNA, 17 bp, synthetic construct
  misc_feature 1..17: note = Oligonucleotide
  source 1..17: mol_type = other DNA
gaagcaggagagcactg

SEQ ID NO: 24350 - DNA, 17 bp, synthetic construct
  misc_feature 1..17: note = Oligonucleotide
  source 1..17: mol_type = other DNA
gatgaagcaggagagca

SEQ ID NO: 24351 - DNA, 17 bp, synthetic construct
  misc_feature 1..17: note = Oligonucleotide
  source 1..17: mol_type = other DNA
ccagatgaagcaggaga

SEQ ID NO: 24352 - DNA, 17 bp, synthetic construct
  misc_feature 1..17: note = Oligonucleotide
  source 1..17: mol_type = other DNA
tttccagatgaagcagg

SEQ ID NO: 24353 - DNA, 17 bp, synthetic construct
  misc_feature 1..17: note = Oligonucleotide
  source 1..17: mol_type = other DNA
atgtttccagatgaagc

SEQ ID NO: 24354 - DNA, 17 bp, synthetic construct
  misc_feature 1..17: note = Oligonucleotide
  source 1..17: mol_type = other DNA
caaatgtttccagatga

SEQ ID NO: 24355 - DNA, 17 bp, synthetic construct
  misc_feature 1..17: note = Oligonucleotide
  source 1..17: mol_type = other DNA
agacaaatgtttccaga

SEQ ID NO: 24356 - DNA, 17 bp, synthetic construct
  misc_feature 1..17: note = Oligonucleotide
  source 1..17: mol_type = other DNA
cagagacaaatgtttcc

SEQ ID NO: 24357 - DNA, 17 bp, synthetic construct
  misc_feature 1..17: note = Oligonucleotide
  source 1..17: mol_type = other DNA
aggcagagacaaatgtt

SEQ ID NO: 24358 - DNA, 17 bp, synthetic construct
  misc_feature 1..17: note = Oligonucleotide
  source 1..17: mol_type = other DNA
gggaggcagagacaaat

SEQ ID NO: 24359 - DNA, 17 bp, synthetic construct
  misc_feature 1..17: note = Oligonucleotide
  source 1..17: mol_type = other DNA
caagggaggcagagaca

SEQ ID NO: 24360 - DNA, 17 bp, synthetic construct
  misc_feature 1..17: note = Oligonucleotide
  source 1..17: mol_type = other DNA
ggtcaagggaggcagag

SEQ ID NO: 24361 - DNA, 17 bp, synthetic construct
  misc_feature 1..17: note = Oligonucleotide
  source 1..17: mol_type = other DNA
ccaggtcaagggaggca

SEQ ID NO: 24362 - DNA, 17 bp, synthetic construct
  misc_feature 1..17: note = Oligonucleotide
  source 1..17: mol_type = other DNA
gacccaggtcaagggag

SEQ ID NO: 24363 - DNA, 17 bp, synthetic construct
  misc_feature 1..17: note = Oligonucleotide
  source 1..17: mol_type = other DNA
gaagacccaggtcaagg

SEQ ID NO: 24364 - DNA, 17 bp, synthetic construct
  misc_feature 1..17: note = Oligonucleotide
  source 1..17: mol_type = other DNA
tcagaagacccaggtca

SEQ ID NO: 24365 - DNA, 17 bp, synthetic construct
  misc_feature 1..17: note = Oligonucleotide
  source 1..17: mol_type = other DNA
gagtcagaagacccagg

SEQ ID NO: 24366 - DNA, 17 bp, synthetic construct
  misc_feature 1..17: note = Oligonucleotide
  source 1..17: mol_type = other DNA
caagagtcagaagaccc

SEQ ID NO: 24367 - DNA, 17 bp, synthetic construct
  misc_feature 1..17: note = Oligonucleotide
  source 1..17: mol_type = other DNA
cagcaagagtcagaaga

SEQ ID NO: 24368 - DNA, 17 bp, synthetic construct
  misc_feature 1..17: note = Oligonucleotide
  source 1..17: mol_type = other DNA
gaacagcaagagtcaga

SEQ ID NO: 24369 - DNA, 17 bp, synthetic construct
  misc_feature 1..17: note = Oligonucleotide
  source 1..17: mol_type = other DNA
caggaacagcaagagtc

SEQ ID NO: 24370 - DNA, 17 bp, synthetic construct
  misc_feature 1..17: note = Oligonucleotide
  source 1..17: mol_type = other DNA
gcccaggaacagcaaga

SEQ ID NO: 24371 - DNA, 17 bp, synthetic construct
  misc_feature 1..17: note = Oligonucleotide
  source 1..17: mol_type = other DNA
cgggcccaggaacagca

SEQ ID NO: 24372 - DNA, 17 bp, synthetic construct
  misc_feature 1..17: note = Oligonucleotide
  source 1..17: mol_type = other DNA
ggtcgggcccaggaaca

SEQ ID NO: 24373 - DNA, 17 bp, synthetic construct
  misc_feature 1..17: note = Oligonucleotide
  source 1..17: mol_type = other DNA
cagggtcgggcccagga

SEQ ID NO: 24374 - DNA, 17 bp, synthetic construct
  misc_feature 1..17: note = Oligonucleotide
  source 1..17: mol_type = other DNA
ctgcagggtcgggccca

SEQ ID NO: 24375 - DNA, 17 bp, synthetic construct
  misc_feature 1..17: note = Oligonucleotide
  source 1..17: mol_type = other DNA
gacctgcagggtcgggc

SEQ ID NO: 24376 - DNA, 17 bp, synthetic construct
  misc_feature 1..17: note = Oligonucleotide
  source 1..17: mol_type = other DNA
ctagacctgcagggtcg

SEQ ID NO: 24377 - DNA, 17 bp, synthetic construct
  misc_feature 1..17: note = Oligonucleotide
  source 1..17: mol_type = other DNA
gacctagacctgcaggg

SEQ ID NO: 24378 - DNA, 17 bp, synthetic construct
  misc_feature 1..17: note = Oligonucleotide
  source 1..17: mol_type = other DNA
atggacctagacctgca

SEQ ID NO: 24379 - DNA, 17 bp, synthetic construct
  misc_feature 1..17: note = Oligonucleotide
  source 1..17: mol_type = other DNA
tgcatggacctagacct

SEQ ID NO: 24380 - DNA, 17 bp, synthetic construct
  misc_feature 1..17: note = Oligonucleotide
  source 1..17: mol_type = other DNA
aggtgcatggacctaga

SEQ ID NO: 24381 - DNA, 17 bp, synthetic construct
  misc_feature 1..17: note = Oligonucleotide
  source 1..17: mol_type = other DNA
ggcaggtgcatggacct

SEQ ID NO: 24382 - DNA, 17 bp, synthetic construct
  misc_feature 1..17: note = Oligonucleotide
  source 1..17: mol_type = other DNA
cagggcaggtgcatgga

SEQ ID NO: 24383 - DNA, 17 bp, synthetic construct
  misc_feature 1..17: note = Oligonucleotide
  source 1..17: mol_type = other DNA
ctgcagggcaggtgcat

SEQ ID NO: 24384 - DNA, 17 bp, synthetic construct
  misc_feature 1..17: note = Oligonucleotide
  source 1..17: mol_type = other DNA
ggcctgcagggcaggtg

SEQ ID NO: 24385 - DNA, 17 bp, synthetic construct
  misc_feature 1..17: note = Oligonucleotide
  source 1..17: mol_type = other DNA
caaggcctgcagggcag

SEQ ID NO: 24386 - DNA, 17 bp, synthetic construct
  misc_feature 1..17: note = Oligonucleotide
  source 1..17: mol_type = other DNA
gctcaaggcctgcaggg

SEQ ID NO: 24387 - DNA, 17 bp, synthetic construct
  misc_feature 1..17: note = Oligonucleotide
  source 1..17: mol_type = other DNA
gtggctcaaggcctgca

SEQ ID NO: 24388 - DNA, 17 bp, synthetic construct
  misc_feature 1..17: note = Oligonucleotide
  source 1..17: mol_type = other DNA
agagtggctcaaggcct

SEQ ID NO: 24389 - DNA, 17 bp, synthetic construct
  misc_feature 1..17: note = Oligonucleotide
  source 1..17: mol_type = other DNA
aggagagtggctcaagg

SEQ ID NO: 24390 - DNA, 17 bp, synthetic construct
  misc_feature 1..17: note = Oligonucleotide
  source 1..17: mol_type = other DNA
cctaggagagtggctca

SEQ ID NO: 24391 - DNA, 17 bp, synthetic construct
  misc_feature 1..17: note = Oligonucleotide
  source 1..17: mol_type = other DNA
agtcctaggagagtggc

SEQ ID NO: 24392 - DNA, 17 bp, synthetic construct
  misc_feature 1..17: note = Oligonucleotide
  source 1..17: mol_type = other DNA
ggcagtcctaggagagt

SEQ ID NO: 24393 - DNA, 17 bp, synthetic construct
  misc_feature 1..17: note = Oligonucleotide
  source 1..17: mol_type = other DNA
actggcagtcctaggag

SEQ ID NO: 24394 - DNA, 17 bp, synthetic construct
  misc_feature 1..17: note = Oligonucleotide
  source 1..17: mol_type = other DNA
agaactggcagtcctag

SEQ ID NO: 24395 - DNA, 17 bp, synthetic construct
  misc_feature 1..17: note = Oligonucleotide
  source 1..17: mol_type = other DNA
tgcagaactggcagtcc

SEQ ID NO: 24396 - DNA, 17 bp, synthetic construct
  misc_feature 1..17: note = Oligonucleotide
  source 1..17: mol_type = other DNA
cagtgcagaactggcag

SEQ ID NO: 24397 - DNA, 17 bp, synthetic construct
  misc_feature 1..17: note = Oligonucleotide
  source 1..17: mol_type = other DNA
gaccagtgcagaactgg

SEQ ID NO: 24398 - DNA, 17 bp, synthetic construct
  misc_feature 1..17: note = Oligonucleotide
  source 1..17: mol_type = other DNA
agggaccagtgcagaac

SEQ ID NO: 24399 - DNA, 17 bp, synthetic construct
  misc_feature 1..17: note = Oligonucleotide
  source 1..17: mol_type = other DNA
ctgagggaccagtgcag

SEQ ID NO: 24400 - DNA, 17 bp, synthetic construct
  misc_feature 1..17: note = Oligonucleotide
  source 1..17: mol_type = other DNA
tgcctgagggaccagtg

SEQ ID NO: 24401 - DNA, 17 bp, synthetic construct
  misc_feature 1..17: note = Oligonucleotide
  source 1..17: mol_type = other DNA
gggtgcctgagggacca

SEQ ID NO: 24402 - DNA, 17 bp, synthetic construct
  misc_feature 1..17: note = Oligonucleotide
  source 1..17: mol_type = other DNA
agagggtgcctgaggga

SEQ ID NO: 24403 - DNA, 17 bp, synthetic construct
  misc_feature 1..17: note = Oligonucleotide
  source 1..17: mol_type = other DNA
acaagagggtgcctgag

SEQ ID NO: 24404 - DNA, 17 bp, synthetic construct
  misc_feature 1..17: note = Oligonucleotide
  source 1..17: mol_type = other DNA
agtacaagagggtgcct

SEQ ID NO: 24405 - DNA, 17 bp, synthetic construct
  misc_feature 1..17: note = Oligonucleotide
  source 1..17: mol_type = other DNA
ccgagtacaagagggtg

SEQ ID NO: 24406 - DNA, 17 bp, synthetic construct
  misc_feature 1..17: note = Oligonucleotide
  source 1..17: mol_type = other DNA
caaccgagtacaagagg

SEQ ID NO: 24407 - DNA, 17 bp, synthetic construct
  misc_feature 1..17: note = Oligonucleotide
  source 1..17: mol_type = other DNA
catcaaccgagtacaag

SEQ ID NO: 24408 - DNA, 17 bp, synthetic construct
  misc_feature 1..17: note = Oligonucleotide
  source 1..17: mol_type = other DNA
atccatcaaccgagtac

SEQ ID NO: 24409 - DNA, 17 bp, synthetic construct
  misc_feature 1..17: note = Oligonucleotide
  source 1..17: mol_type = other DNA
cccatccatcaaccgag

SEQ ID NO: 24410 - DNA, 17 bp, synthetic construct
  misc_feature 1..17: note = Oligonucleotide
  source 1..17: mol_type = other DNA
ccacccatccatcaacc

SEQ ID NO: 24411 - DNA, 17 bp, synthetic construct
  misc_feature 1..17: note = Oligonucleotide
  source 1..17: mol_type = other DNA
tgtccacccatccatca

SEQ ID NO: 24412 - DNA, 17 bp, synthetic construct
  misc_feature 1..17: note = Oligonucleotide
  source 1..17: mol_type = other DNA
acctgtccacccatcca

SEQ ID NO: 24413 - DNA, 17 bp, synthetic construct
  misc_feature 1..17: note = Oligonucleotide
  source 1..17: mol_type = other DNA
agcacctgtccacccat

SEQ ID NO: 24414 - DNA, 17 bp, synthetic construct
  misc_feature 1..17: note = Oligonucleotide
  source 1..17: mol_type = other DNA
aggagcacctgtccacc

SEQ ID NO: 24415 - DNA, 17 bp, synthetic construct
  misc_feature 1..17: note = Oligonucleotide
  source 1..17: mol_type = other DNA
aaaaggagcacctgtcc

SEQ ID NO: 24416 - DNA, 17 bp, synthetic construct
  misc_feature 1..17: note = Oligonucleotide
  source 1..17: mol_type = other DNA
ccaaaaaggagcacctg

SEQ ID NO: 24417 - DNA, 17 bp, synthetic construct
  misc_feature 1..17: note = Oligonucleotide
  source 1..17: mol_type = other DNA
gagccaaaaaggagcac

SEQ ID NO: 24418 - DNA, 17 bp, synthetic construct
  misc_feature 1..17: note = Oligonucleotide
  source 1..17: mol_type = other DNA
gaggagccaaaaaggag

SEQ ID NO: 24419 - DNA, 17 bp, synthetic construct
  misc_feature 1..17: note = Oligonucleotide
  source 1..17: mol_type = other DNA
caagaggagccaaaaag

SEQ ID NO: 24420 - DNA, 17 bp, synthetic construct
  misc_feature 1..17: note = Oligonucleotide
  source 1..17: mol_type = other DNA
ggccaagaggagccaaa

SEQ ID NO: 24421 - DNA, 17 bp, synthetic construct
  misc_feature 1..17: note = Oligonucleotide
  source 1..17: mol_type = other DNA
gcaggccaagaggagcc

SEQ ID NO: 24422 - DNA, 17 bp, synthetic construct
  misc_feature 1..17: note = Oligonucleotide
  source 1..17: mol_type = other DNA
ccagcaggccaagagga

SEQ ID NO: 24423 - DNA, 17 bp, synthetic construct
  misc_feature 1..17: note = Oligonucleotide
  source 1..17: mol_type = other DNA
ggcccagcaggccaaga

SEQ ID NO: 24424 - DNA, 17 bp, synthetic construct
  misc_feature 1..17: note = Oligonucleotide
  source 1..17: mol_type = other DNA
tgaggcccagcaggcca

SEQ ID NO: 24425 - DNA, 17 bp, synthetic construct
  misc_feature 1..17: note = Oligonucleotide
  source 1..17: mol_type = other DNA
agctgaggcccagcagg

SEQ ID NO: 24426 - DNA, 17 bp, synthetic construct
  misc_feature 1..17: note = Oligonucleotide
  source 1..17: mol_type = other DNA
ggcagctgaggcccagc

SEQ ID NO: 24427 - DNA, 17 bp, synthetic construct
  misc_feature 1..17: note = Oligonucleotide
  source 1..17: mol_type = other DNA
gctggcagctgaggccc

SEQ ID NO: 24428 - DNA, 17 bp, synthetic construct
  misc_feature 1..17: note = Oligonucleotide
  source 1..17: mol_type = other DNA
catgctggcagctgagg

SEQ ID NO: 24429 - DNA, 17 bp, synthetic construct
  misc_feature 1..17: note = Oligonucleotide
  source 1..17: mol_type = other DNA
gtgcatgctggcagctg

SEQ ID NO: 24430 - DNA, 17 bp, synthetic construct
  misc_feature 1..17: note = Oligonucleotide
  source 1..17: mol_type = other DNA
aatgtgcatgctggcag

SEQ ID NO: 24431 - DNA, 17 bp, synthetic construct
  misc_feature 1..17: note = Oligonucleotide
  source 1..17: mol_type = other DNA
accaatgtgcatgctgg

SEQ ID NO: 24432 - DNA, 17 bp, synthetic construct
  misc_feature 1..17: note = Oligonucleotide
  source 1..17: mol_type = other DNA
ccaaccaatgtgcatgc

SEQ ID NO: 24433 - DNA, 17 bp, synthetic construct
  misc_feature 1..17: note = Oligonucleotide
  source 1..17: mol_type = other DNA
aacccaaccaatgtgca

SEQ ID NO: 24434 - DNA, 17 bp, synthetic construct
  misc_feature 1..17: note = Oligonucleotide
  source 1..17: mol_type = other DNA
gacaacccaaccaatgt

SEQ ID NO: 24435 - DNA, 17 bp, synthetic construct
  misc_feature 1..17: note = Oligonucleotide
  source 1..17: mol_type = other DNA
tctgacaacccaaccaa

SEQ ID NO: 24436 - DNA, 17 bp, synthetic construct
  misc_feature 1..17: note = Oligonucleotide
  source 1..17: mol_type = other DNA
gagtctgacaacccaac

SEQ ID NO: 24437 - DNA, 17 bp, synthetic construct
  misc_feature 1..17: note = Oligonucleotide
  source 1..17: mol_type = other DNA
ggggagtctgacaaccc

SEQ ID NO: 24438 - DNA, 17 bp, synthetic construct
  misc_feature 1..17: note = Oligonucleotide
  source 1..17: mol_type = other DNA
cctggggagtctgacaa

SEQ ID NO: 24439 - DNA, 17 bp, synthetic construct
  misc_feature 1..17: note = Oligonucleotide
  source 1..17: mol_type = other DNA
gggcctggggagtctga

SEQ ID NO: 24440 - DNA, 17 bp, synthetic construct
  misc_feature 1..17: note = Oligonucleotide
  source 1..17: mol_type = other DNA
caggggcctggggagtc

SEQ ID NO: 24441 - DNA, 17 bp, synthetic construct
  misc_feature 1..17: note = Oligonucleotide
  source 1..17: mol_type = other DNA
gggcaggggcctgggga

SEQ ID NO: 24442 - DNA, 17 bp, synthetic construct
  misc_feature 1..17: note = Oligonucleotide
  source 1..17: mol_type = other DNA
atggggcaggggcctgg

SEQ ID NO: 24443 - DNA, 17 bp, synthetic construct
  misc_feature 1..17: note = Oligonucleotide
  source 1..17: mol_type = other DNA
ggcatggggcaggggcc

SEQ ID NO: 24444 - DNA, 17 bp, synthetic construct
  misc_feature 1..17: note = Oligonucleotide
  source 1..17: mol_type = other DNA
cagggcatggggcaggg

SEQ ID NO: 24445 - DNA, 17 bp, synthetic construct
  misc_feature 1..17: note = Oligonucleotide
  source 1..17: mol_type = other DNA
agccagggcatggggca

SEQ ID NO: 24446 - DNA, 17 bp, synthetic construct
  misc_feature 1..17: note = Oligonucleotide
  source 1..17: mol_type = other DNA
cagagccagggcatggg

SEQ ID NO: 24447 - DNA, 17 bp, synthetic construct
  misc_feature 1..17: note = Oligonucleotide
  source 1..17: mol_type = other DNA
caacagagccagggcat

SEQ ID NO: 24448 - DNA, 17 bp, synthetic construct
  misc_feature 1..17: note = Oligonucleotide
  source 1..17: mol_type = other DNA
gagcaacagagccaggg

SEQ ID NO: 24449 - DNA, 17 bp, synthetic construct
  misc_feature 1..17: note = Oligonucleotide
  source 1..17: mol_type = other DNA
ccagagcaacagagcca

SEQ ID NO: 24450 - DNA, 17 bp, synthetic construct
  misc_feature 1..17: note = Oligonucleotide
  source 1..17: mol_type = other DNA
tgcccagagcaacagag

SEQ ID NO: 24451 - DNA, 17 bp, synthetic construct
  misc_feature 1..17: note = Oligonucleotide
  source 1..17: mol_type = other DNA
gtgtgcccagagcaaca

SEQ ID NO: 24452 - DNA, 17 bp, synthetic construct
  misc_feature 1..17: note = Oligonucleotide
  source 1..17: mol_type = other DNA
atcgtgtgcccagagca

SEQ ID NO: 24453 - DNA, 17 bp, synthetic construct
  misc_feature 1..17: note = Oligonucleotide
  source 1..17: mol_type = other DNA
tgcatcgtgtgcccaga

SEQ ID NO: 24454 - DNA, 17 bp, synthetic construct
  misc_feature 1..17: note = Oligonucleotide
  source 1..17: mol_type = other DNA
ggctgcatcgtgtgccc

SEQ ID NO: 24455 - DNA, 17 bp, synthetic construct
  misc_feature 1..17: note = Oligonucleotide
  source 1..17: mol_type = other DNA
aagggctgcatcgtgtg

SEQ ID NO: 24456 - DNA, 17 bp, synthetic construct
  misc_feature 1..17: note = Oligonucleotide
  source 1..17: mol_type = other DNA
ttcaagggctgcatcgt

SEQ ID NO: 24457 - DNA, 17 bp, synthetic construct
  misc_feature 1..17: note = Oligonucleotide
  source 1..17: mol_type = other DNA
tgtttcaagggctgcat

SEQ ID NO: 24458 - DNA, 17 bp, synthetic construct
  misc_feature 1..17: note = Oligonucleotide
  source 1..17: mol_type = other DNA
tgatgtttcaagggctg

SEQ ID NO: 24459 - DNA, 17 bp, synthetic construct
  misc_feature 1..17: note = Oligonucleotide
  source 1..17: mol_type = other DNA
tcctgatgtttcaaggg

SEQ ID NO: 24460 - DNA, 17 bp, synthetic construct
  misc_feature 1..17: note = Oligonucleotide
  source 1..17: mol_type = other DNA
aaatcctgatgtttcaa

SEQ ID NO: 24461 - DNA, 17 bp, synthetic construct
  misc_feature 1..17: note = Oligonucleotide
  source 1..17: mol_type = other DNA
tcaaaatcctgatgttt

SEQ ID NO: 24462 - DNA, 17 bp, synthetic construct
  misc_feature 1..17: note = Oligonucleotide
  source 1..17: mol_type = other DNA
ggatcaaaatcctgatg

SEQ ID NO: 24463 - DNA, 17 bp, synthetic construct
  misc_feature 1..17: note = Oligonucleotide
  source 1..17: mol_type = other DNA
tatggatcaaaatcctg

SEQ ID NO: 24464 - DNA, 17 bp, synthetic construct
  misc_feature 1..17: note = Oligonucleotide
  source 1..17: mol_type = other DNA
gtttatggatcaaaatc

SEQ ID NO: 24465 - DNA, 17 bp, synthetic construct
  misc_feature 1..17: note = Oligonucleotide
  source 1..17: mol_type = other DNA
catgtttatggatcaaa

SEQ ID NO: 24466 - DNA, 17 bp, synthetic construct
  misc_feature 1..17: note = Oligonucleotide
  source 1..17: mol_type = other DNA
ctccatgtttatggatc

SEQ ID NO: 24467 - DNA, 17 bp, synthetic construct
  misc_feature 1..17: note = Oligonucleotide
  source 1..17: mol_type = other DNA
ggtctccatgtttatgg

SEQ ID NO: 24468 - DNA, 17 bp, synthetic construct
  misc_feature 1..17: note = Oligonucleotide
  source 1..17: mol_type = other DNA
ggtggtctccatgttta

SEQ ID NO: 24469 - DNA, 17 bp, synthetic construct
  misc_feature 1..17: note = Oligonucleotide
  source 1..17: mol_type = other DNA
ataggtggtctccatgt

SEQ ID NO: 24470 - DNA, 17 bp, synthetic construct
  misc_feature 1..17: note = Oligonucleotide
  source 1..17: mol_type = other DNA
gtaataggtggtctcca

SEQ ID NO: 24471 - DNA, 17 bp, synthetic construct
  misc_feature 1..17: note = Oligonucleotide
  source 1..17: mol_type = other DNA
tgggtaataggtggtct

SEQ ID NO: 24472 - DNA, 17 bp, synthetic construct
  misc_feature 1..17: note = Oligonucleotide
  source 1..17: mol_type = other DNA
aggtgggtaataggtgg

SEQ ID NO: 24473 - DNA, 17 bp, synthetic construct
  misc_feature 1..17: note = Oligonucleotide
  source 1..17: mol_type = other DNA
tggaggtgggtaatagg

SEQ ID NO: 24474 - DNA, 17 bp, synthetic construct
  misc_feature 1..17: note = Oligonucleotide
  source 1..17: mol_type = other DNA
ccttggaggtgggtaat

SEQ ID NO: 24475 - DNA, 17 bp, synthetic construct
  misc_feature 1..17: note = Oligonucleotide
  source 1..17: mol_type = other DNA
ggtccttggaggtgggt

SEQ ID NO: 24476 - DNA, 17 bp, synthetic construct
  misc_feature 1..17: note = Oligonucleotide
  source 1..17: mol_type = other DNA
agtggtccttggaggtg

SEQ ID NO: 24477 - DNA, 17 bp, synthetic construct
  misc_feature 1..17: note = Oligonucleotide
  source 1..17: mol_type = other DNA
cagagtggtccttggag

SEQ ID NO: 24478 - DNA, 17 bp, synthetic construct
  misc_feature 1..17: note = Oligonucleotide
  source 1..17: mol_type = other DNA
actcagagtggtccttg

SEQ ID NO: 24479 - DNA, 17 bp, synthetic construct
  misc_feature 1..17: note = Oligonucleotide
  source 1..17: mol_type = other DNA
gagactcagagtggtcc

SEQ ID NO: 24480 - DNA, 17 bp, synthetic construct
  misc_feature 1..17: note = Oligonucleotide
  source 1..17: mol_type = other DNA
ggggagactcagagtgg

SEQ ID NO: 24481 - DNA, 17 bp, synthetic construct
  misc_feature 1..17: note = Oligonucleotide
  source 1..17: mol_type = other DNA
ccgggggagactcagag

SEQ ID NO: 24482 - DNA, 17 bp, synthetic construct
  misc_feature 1..17: note = Oligonucleotide
  source 1..17: mol_type = other DNA
ctaccgggggagactca

SEQ ID NO: 24483 - DNA, 17 bp, synthetic construct
  misc_feature 1..17: note = Oligonucleotide
  source 1..17: mol_type = other DNA
catctaccgggggagac

SEQ ID NO: 24484 - DNA, 17 bp, synthetic construct
  misc_feature 1..17: note = Oligonucleotide
  source 1..17: mol_type = other DNA
tgccatctaccggggga

SEQ ID NO: 24485 - DNA, 17 bp, synthetic construct
  misc_feature 1..17: note = Oligonucleotide
  source 1..17: mol_type = other DNA
gagtgccatctaccggg

SEQ ID NO: 24486 - DNA, 17 bp, synthetic construct
  misc_feature 1..17: note = Oligonucleotide
  source 1..17: mol_type = other DNA
tgtgagtgccatctacc

SEQ ID NO: 24487 - DNA, 17 bp, synthetic construct
  misc_feature 1..17: note = Oligonucleotide
  source 1..17: mol_type = other DNA
gtctgtgagtgccatct

SEQ ID NO: 24488 - DNA, 17 bp, synthetic construct
  misc_feature 1..17: note = Oligonucleotide
  source 1..17: mol_type = other DNA
gcggtctgtgagtgcca

SEQ ID NO: 24489 - DNA, 17 bp, synthetic construct
  misc_feature 1..17: note = Oligonucleotide
  source 1..17: mol_type = other DNA
cacgcggtctgtgagtg

SEQ ID NO: 24490 - DNA, 17 bp, synthetic construct
  misc_feature 1..17: note = Oligonucleotide
  source 1..17: mol_type = other DNA
tgccacgcggtctgtga

SEQ ID NO: 24491 - DNA, 17 bp, synthetic construct
  misc_feature 1..17: note = Oligonucleotide
  source 1..17: mol_type = other DNA
gcatgccacgcggtctg

SEQ ID NO: 24492 - DNA, 17 bp, synthetic construct
  misc_feature 1..17: note = Oligonucleotide
  source 1..17: mol_type = other DNA
ccagcatgccacgcggt

SEQ ID NO: 24493 - DNA, 17 bp, synthetic construct
  misc_feature 1..17: note = Oligonucleotide
  source 1..17: mol_type = other DNA
ctcccagcatgccacgc

SEQ ID NO: 24494 - DNA, 17 bp, synthetic construct
  misc_feature 1..17: note = Oligonucleotide
  source 1..17: mol_type = other DNA
gcactcccagcatgcca

SEQ ID NO: 24495 - DNA, 17 bp, synthetic construct
  misc_feature 1..17: note = Oligonucleotide
  source 1..17: mol_type = other DNA
tgagcactcccagcatg

SEQ ID NO: 24496 - DNA, 17 bp, synthetic construct
  misc_feature 1..17: note = Oligonucleotide
  source 1..17: mol_type = other DNA
tgctgagcactcccagc

SEQ ID NO: 24497 - DNA, 17 bp, synthetic construct
  misc_feature 1..17: note = Oligonucleotide
  source 1..17: mol_type = other DNA
agctgctgagcactccc

SEQ ID NO: 24498 - DNA, 17 bp, synthetic construct
  misc_feature 1..17: note = Oligonucleotide
  source 1..17: mol_type = other DNA
ggcagctgctgagcact

SEQ ID NO: 24499 - DNA, 17 bp, synthetic construct
  misc_feature 1..17: note = Oligonucleotide
  source 1..17: mol_type = other DNA
actggcagctgctgagc

SEQ ID NO: 24500 - DNA, 17 bp, synthetic construct
  misc_feature 1..17: note = Oligonucleotide
  source 1..17: mol_type = other DNA
aacactggcagctgctg

SEQ ID NO: 24501 - DNA, 17 bp, synthetic construct
  misc_feature 1..17: note = Oligonucleotide
  source 1..17: mol_type = other DNA
actaacactggcagctg

SEQ ID NO: 24502 - DNA, 17 bp, synthetic construct
  misc_feature 1..17: note = Oligonucleotide
  source 1..17: mol_type = other DNA
tctactaacactggcag

SEQ ID NO: 24503 - DNA, 17 bp, synthetic construct
  misc_feature 1..17: note = Oligonucleotide
  source 1..17: mol_type = other DNA
acgtctactaacactgg

SEQ ID NO: 24504 - DNA, 17 bp, synthetic construct
  misc_feature 1..17: note = Oligonucleotide
  source 1..17: mol_type = other DNA
tctacgtctactaacac

SEQ ID NO: 24505 - DNA, 17 bp, synthetic construct
  misc_feature 1..17: note = Oligonucleotide
  source 1..17: mol_type = other DNA
gcatctacgtctactaa

SEQ ID NO: 24506 - DNA, 17 bp, synthetic construct
  misc_feature 1..17: note = Oligonucleotide
  source 1..17: mol_type = other DNA
gcagcatctacgtctac

SEQ ID NO: 24507 - DNA, 17 bp, synthetic construct
  misc_feature 1..17: note = Oligonucleotide
  source 1..17: mol_type = other DNA
gaggcagcatctacgtc

SEQ ID NO: 24508 - DNA, 17 bp, synthetic construct
  misc_feature 1..17: note = Oligonucleotide
  source 1..17: mol_type = other DNA
caagaggcagcatctac

SEQ ID NO: 24509 - DNA, 17 bp, synthetic construct
  misc_feature 1..17: note = Oligonucleotide
  source 1..17: mol_type = other DNA
cctcaagaggcagcatc

SEQ ID NO: 24510 - DNA, 17 bp, synthetic construct
  misc_feature 1..17: note = Oligonucleotide
  source 1..17: mol_type = other DNA
caacctcaagaggcagc

SEQ ID NO: 24511 - DNA, 17 bp, synthetic construct
  misc_feature 1..17: note = Oligonucleotide
  source 1..17: mol_type = other DNA
tgccaacctcaagaggc

SEQ ID NO: 24512 - DNA, 17 bp, synthetic construct
  misc_feature 1..17: note = Oligonucleotide
  source 1..17: mol_type = other DNA
gtgtgccaacctcaaga

SEQ ID NO: 24513 - DNA, 17 bp, synthetic construct
  misc_feature 1..17: note = Oligonucleotide
  source 1..17: mol_type = other DNA
actgtgtgccaacctca

SEQ ID NO: 24514 - DNA, 17 bp, synthetic construct
  misc_feature 1..17: note = Oligonucleotide
  source 1..17: mol_type = other DNA
cccactgtgtgccaacc

SEQ ID NO: 24515 - DNA, 17 bp, synthetic construct
  misc_feature 1..17: note = Oligonucleotide
  source 1..17: mol_type = other DNA
gcacccactgtgtgcca

SEQ ID NO: 24516 - DNA, 17 bp, synthetic construct
  misc_feature 1..17: note = Oligonucleotide
  source 1..17: mol_type = other DNA
cgagcacccactgtgtg

SEQ ID NO: 24517 - DNA, 17 bp, synthetic construct
  misc_feature 1..17: note = Oligonucleotide
  source 1..17: mol_type = other DNA
tctcgagcacccactgt

SEQ ID NO: 24518 - DNA, 17 bp, synthetic construct
  misc_feature 1..17: note = Oligonucleotide
  source 1..17: mol_type = other DNA
atttctcgagcacccac

SEQ ID NO: 24519 - DNA, 17 bp, synthetic construct
  misc_feature 1..17: note = Oligonucleotide
  source 1..17: mol_type = other DNA
agcatttctcgagcacc

SEQ ID NO: 24520 - DNA, 17 bp, synthetic construct
  misc_feature 1..17: note = Oligonucleotide
  source 1..17: mol_type = other DNA
gagagcatttctcgagc

SEQ ID NO: 24521 - DNA, 17 bp, synthetic construct
  misc_feature 1..17: note = Oligonucleotide
  source 1..17: mol_type = other DNA
gcagagagcatttctcg

SEQ ID NO: 24522 - DNA, 17 bp, synthetic construct
  misc_feature 1..17: note = Oligonucleotide
  source 1..17: mol_type = other DNA
atagcagagagcatttc

SEQ ID NO: 24523 - DNA, 17 bp, synthetic construct
  misc_feature 1..17: note = Oligonucleotide
  source 1..17: mol_type = other DNA
gtcatagcagagagcat

SEQ ID NO: 24524 - DNA, 17 bp, synthetic construct
  misc_feature 1..17: note = Oligonucleotide
  source 1..17: mol_type = other DNA
taggtcatagcagagag

SEQ ID NO: 24525 - DNA, 17 bp, synthetic construct
  misc_feature 1..17: note = Oligonucleotide
  source 1..17: mol_type = other DNA
gcctaggtcatagcaga

SEQ ID NO: 24526 - DNA, 17 bp, synthetic construct
  misc_feature 1..17: note = Oligonucleotide
  source 1..17: mol_type = other DNA
tctgcctaggtcatagc

SEQ ID NO: 24527 - DNA, 17 bp, synthetic construct
  misc_feature 1..17: note = Oligonucleotide
  source 1..17: mol_type = other DNA
ttgtctgcctaggtcat

SEQ ID NO: 24528 - DNA, 17 bp, synthetic construct
  misc_feature 1..17: note = Oligonucleotide
  source 1..17: mol_type = other DNA
tctttgtctgcctaggt

SEQ ID NO: 24529 - DNA, 17 bp, synthetic construct
  misc_feature 1..17: note = Oligonucleotide
  source 1..17: mol_type = other DNA
ccctctttgtctgccta

SEQ ID NO: 24530 - DNA, 17 bp, synthetic construct
  misc_feature 1..17: note = Oligonucleotide
  source 1..17: mol_type = other DNA
agaccctctttgtctgc

SEQ ID NO: 24531 - DNA, 17 bp, synthetic construct
  misc_feature 1..17: note = Oligonucleotide
  source 1..17: mol_type = other DNA
ggcagaccctctttgtc

SEQ ID NO: 24532 - DNA, 17 bp, synthetic construct
  misc_feature 1..17: note = Oligonucleotide
  source 1..17: mol_type = other DNA
agaggcagaccctcttt

SEQ ID NO: 24533 - DNA, 17 bp, synthetic construct
  misc_feature 1..17: note = Oligonucleotide
  source 1..17: mol_type = other DNA
ggcagaggcagaccctc

SEQ ID NO: 24534 - DNA, 17 bp, synthetic construct
  misc_feature 1..17: note = Oligonucleotide
  source 1..17: mol_type = other DNA
gggggcagaggcagacc

SEQ ID NO: 24535 - DNA, 17 bp, synthetic construct
  misc_feature 1..17: note = Oligonucleotide
  source 1..17: mol_type = other DNA
cttgggggcagaggcag

SEQ ID NO: 24536 - DNA, 17 bp, synthetic construct
  misc_feature 1..17: note = Oligonucleotide
  source 1..17: mol_type = other DNA
ccccttgggggcagagg

SEQ ID NO: 24537 - DNA, 17 bp, synthetic construct
  misc_feature 1..17: note = Oligonucleotide
  source 1..17: mol_type = other DNA
ggaccccttgggggcag

SEQ ID NO: 24538 - DNA, 17 bp, synthetic construct
  misc_feature 1..17: note = Oligonucleotide
  source 1..17: mol_type = other DNA
gtgggaccccttggggg

SEQ ID NO: 24539 - DNA, 17 bp, synthetic construct
  misc_feature 1..17: note = Oligonucleotide
  source 1..17: mol_type = other DNA
ggggtgggaccccttgg

SEQ ID NO: 24540 - DNA, 17 bp, synthetic construct
  misc_feature 1..17: note = Oligonucleotide
  source 1..17: mol_type = other DNA
gcgggggtgggacccct

SEQ ID NO: 24541 - DNA, 17 bp, synthetic construct
  misc_feature 1..17: note = Oligonucleotide
  source 1..17: mol_type = other DNA
ggggcgggggtgggacc

SEQ ID NO: 24542 - DNA, 17 bp, synthetic construct
  misc_feature 1..17: note = Oligonucleotide
  source 1..17: mol_type = other DNA
tctggggcgggggtggg

SEQ ID NO: 24543 - DNA, 17 bp, synthetic construct
  misc_feature 1..17: note = Oligonucleotide
  source 1..17: mol_type = other DNA
ccatctggggcgggggt

SEQ ID NO: 24544 - DNA, 17 bp, synthetic construct
  misc_feature 1..17: note = Oligonucleotide
  source 1..17: mol_type = other DNA
ataccatctggggcggg

SEQ ID NO: 24545 - DNA, 17 bp, synthetic construct
  misc_feature 1..17: note = Oligonucleotide
  source 1..17: mol_type = other DNA
ctgataccatctggggc

SEQ ID NO: 24546 - DNA, 17 bp, synthetic construct
  misc_feature 1..17: note = Oligonucleotide
  source 1..17: mol_type = other DNA
gttctgataccatctgg

SEQ ID NO: 24547 - DNA, 17 bp, synthetic construct
  misc_feature 1..17: note = Oligonucleotide
  source 1..17: mol_type = other DNA
tctgttctgataccatc

SEQ ID NO: 24548 - DNA, 17 bp, synthetic construct
  misc_feature 1..17: note = Oligonucleotide
  source 1..17: mol_type = other DNA
gaatctgttctgatacc

SEQ ID NO: 24549 - DNA, 17 bp, synthetic construct
  misc_feature 1..17: note = Oligonucleotide
  source 1..17: mol_type = other DNA
ggggaatctgttctgat

SEQ ID NO: 24550 - DNA, 17 bp, synthetic construct
  misc_feature 1..17: note = Oligonucleotide
  source 1..17: mol_type = other DNA
aatggggaatctgttct

SEQ ID NO: 24551 - DNA, 17 bp, synthetic construct
  misc_feature 1..17: note = Oligonucleotide
  source 1..17: mol_type = other DNA
tggaatggggaatctgt

SEQ ID NO: 24552 - DNA, 17 bp, synthetic construct
  misc_feature 1..17: note = Oligonucleotide
  source 1..17: mol_type = other DNA
gcatggaatggggaatc

SEQ ID NO: 24553 - DNA, 17 bp, synthetic construct
  misc_feature 1..17: note = Oligonucleotide
  source 1..17: mol_type = other DNA
tcagcatggaatgggga

SEQ ID NO: 24554 - DNA, 17 bp, synthetic construct
  misc_feature 1..17: note = Oligonucleotide
  source 1..17: mol_type = other DNA
gcctcagcatggaatgg

SEQ ID NO: 24555 - DNA, 17 bp, synthetic construct
  misc_feature 1..17: note = Oligonucleotide
  source 1..17: mol_type = other DNA
cttgcctcagcatggaa

SEQ ID NO: 24556 - DNA, 17 bp, synthetic construct
  misc_feature 1..17: note = Oligonucleotide
  source 1..17: mol_type = other DNA
tcacttgcctcagcatg

SEQ ID NO: 24557 - DNA, 17 bp, synthetic construct
  misc_feature 1..17: note = Oligonucleotide
  source 1..17: mol_type = other DNA
aagtcacttgcctcagc

SEQ ID NO: 24558 - DNA, 17 bp, synthetic construct
  misc_feature 1..17: note = Oligonucleotide
  source 1..17: mol_type = other DNA
gaaaagtcacttgcctc

SEQ ID NO: 24559 - DNA, 17 bp, synthetic construct
  misc_feature 1..17: note = Oligonucleotide
  source 1..17: mol_type = other DNA
aaagaaaagtcacttgc

SEQ ID NO: 24560 - DNA, 17 bp, synthetic construct
  misc_feature 1..17: note = Oligonucleotide
  source 1..17: mol_type = other DNA
ggtaaagaaaagtcact

SEQ ID NO: 24561 - DNA, 17 bp, synthetic construct
  misc_feature 1..17: note = Oligonucleotide
  source 1..17: mol_type = other DNA
tagggtaaagaaaagtc

SEQ ID NO: 24562 - DNA, 17 bp, synthetic construct
  misc_feature 1..17: note = Oligonucleotide
  source 1..17: mol_type = other DNA
acttagggtaaagaaaa

SEQ ID NO: 24563 - DNA, 17 bp, synthetic construct
  misc_feature 1..17: note = Oligonucleotide
  source 1..17: mol_type = other DNA
ctgacttagggtaaaga

SEQ ID NO: 24564 - DNA, 17 bp, synthetic construct
  misc_feature 1..17: note = Oligonucleotide
  source 1..17: mol_type = other DNA
gttctgacttagggtaa

SEQ ID NO: 24565 - DNA, 17 bp, synthetic construct
  misc_feature 1..17: note = Oligonucleotide
  source 1..17: mol_type = other DNA
caagttctgacttaggg

SEQ ID NO: 24566 - DNA, 17 bp, synthetic construct
  misc_feature 1..17: note = Oligonucleotide
  source 1..17: mol_type = other DNA
tgccaagttctgactta

SEQ ID NO: 24567 - DNA, 17 bp, synthetic construct
  misc_feature 1..17: note = Oligonucleotide
  source 1..17: mol_type = other DNA
gcatgccaagttctgac

SEQ ID NO: 24568 - DNA, 17 bp, synthetic construct
  misc_feature 1..17: note = Oligonucleotide
  source 1..17: mol_type = other DNA
atagcatgccaagttct

SEQ ID NO: 24569 - DNA, 17 bp, synthetic construct
  misc_feature 1..17: note = Oligonucleotide
  source 1..17: mol_type = other DNA
ctaatagcatgccaagt

SEQ ID NO: 24570 - DNA, 17 bp, synthetic construct
  misc_feature 1..17: note = Oligonucleotide
  source 1..17: mol_type = other DNA
atgctaatagcatgcca

SEQ ID NO: 24571 - DNA, 17 bp, synthetic construct
  misc_feature 1..17: note = Oligonucleotide
  source 1..17: mol_type = other DNA
ttaatgctaatagcatg

SEQ ID NO: 24572 - DNA, 17 bp, synthetic construct
  misc_feature 1..17: note = Oligonucleotide
  source 1..17: mol_type = other DNA
aacttaatgctaatagc

SEQ ID NO: 24573 - DNA, 17 bp, synthetic construct
  misc_feature 1..17: note = Oligonucleotide
  source 1..17: mol_type = other DNA
ggaaacttaatgctaat

SEQ ID NO: 24574 - DNA, 17 bp, synthetic construct
  misc_feature 1..17: note = Oligonucleotide
  source 1..17: mol_type = other DNA
aggggaaacttaatgct

SEQ ID NO: 24575 - DNA, 17 bp, synthetic construct
  misc_feature 1..17: note = Oligonucleotide
  source 1..17: mol_type = other DNA
ataaggggaaacttaat

SEQ ID NO: 24576 - DNA, 17 bp, synthetic construct
  misc_feature 1..17: note = Oligonucleotide
  source 1..17: mol_type = other DNA
gaaataaggggaaactt

SEQ ID NO: 24577 - DNA, 17 bp, synthetic construct
  misc_feature 1..17: note = Oligonucleotide
  source 1..17: mol_type = other DNA
gatgaaataaggggaaa

SEQ ID NO: 24578 - DNA, 17 bp, synthetic construct
  misc_feature 1..17: note = Oligonucleotide
  source 1..17: mol_type = other DNA
aaagatgaaataagggg

SEQ ID NO: 24579 - DNA, 17 bp, synthetic construct
  misc_feature 1..17: note = Oligonucleotide
  source 1..17: mol_type = other DNA
tgcaaagatgaaataag

SEQ ID NO: 24580 - DNA, 17 bp, synthetic construct
  misc_feature 1..17: note = Oligonucleotide
  source 1..17: mol_type = other DNA
acgtgcaaagatgaaat

SEQ ID NO: 24581 - DNA, 17 bp, synthetic construct
  misc_feature 1..17: note = Oligonucleotide
  source 1..17: mol_type = other DNA
gtgacgtgcaaagatga

SEQ ID NO: 24582 - DNA, 17 bp, synthetic construct
  misc_feature 1..17: note = Oligonucleotide
  source 1..17: mol_type = other DNA
ggagtgacgtgcaaaga

SEQ ID NO: 24583 - DNA, 17 bp, synthetic construct
  misc_feature 1..17: note = Oligonucleotide
  source 1..17: mol_type = other DNA
gcgggagtgacgtgcaa

SEQ ID NO: 24584 - DNA, 17 bp, synthetic construct
  misc_feature 1..17: note = Oligonucleotide
  source 1..17: mol_type = other DNA
aaggcgggagtgacgtg

SEQ ID NO: 24585 - DNA, 17 bp, synthetic construct
  misc_feature 1..17: note = Oligonucleotide
  source 1..17: mol_type = other DNA
cagaaggcgggagtgac

SEQ ID NO: 24586 - DNA, 17 bp, synthetic construct
  misc_feature 1..17: note = Oligonucleotide
  source 1..17: mol_type = other DNA
atgcagaaggcgggagt

SEQ ID NO: 24587 - DNA, 17 bp, synthetic construct
  misc_feature 1..17: note = Oligonucleotide
  source 1..17: mol_type = other DNA
aggatgcagaaggcggg

SEQ ID NO: 24588 - DNA, 17 bp, synthetic construct
  misc_feature 1..17: note = Oligonucleotide
  source 1..17: mol_type = other DNA
ttgaggatgcagaaggc

SEQ ID NO: 24589 - DNA, 17 bp, synthetic construct
  misc_feature 1..17: note = Oligonucleotide
  source 1..17: mol_type = other DNA
accttgaggatgcagaa

SEQ ID NO: 24590 - DNA, 17 bp, synthetic construct
  misc_feature 1..17: note = Oligonucleotide
  source 1..17: mol_type = other DNA
cgcaccttgaggatgca

SEQ ID NO: 24591 - DNA, 17 bp, synthetic construct
  misc_feature 1..17: note = Oligonucleotide
  source 1..17: mol_type = other DNA
gagcgcaccttgaggat

SEQ ID NO: 24592 - DNA, 17 bp, synthetic construct
  misc_feature 1..17: note = Oligonucleotide
  source 1..17: mol_type = other DNA
aatgagcgcaccttgag

SEQ ID NO: 24593 - DNA, 17 bp, synthetic construct
  misc_feature 1..17: note = Oligonucleotide
  source 1..17: mol_type = other DNA
cagaatgagcgcacctt

SEQ ID NO: 24594 - DNA, 17 bp, synthetic construct
  misc_feature 1..17: note = Oligonucleotide
  source 1..17: mol_type = other DNA
acgcagaatgagcgcac

SEQ ID NO: 24595 - DNA, 17 bp, synthetic construct
  misc_feature 1..17: note = Oligonucleotide
  source 1..17: mol_type = other DNA
gcgacgcagaatgagcg

SEQ ID NO: 24596 - DNA, 17 bp, synthetic construct
  misc_feature 1..17: note = Oligonucleotide
  source 1..17: mol_type = other DNA
ggagcgacgcagaatga

SEQ ID NO: 24597 - DNA, 17 bp, synthetic construct
  misc_feature 1..17: note = Oligonucleotide
  source 1..17: mol_type = other DNA
gatggagcgacgcagaa

SEQ ID NO: 24598 - DNA, 17 bp, synthetic construct
  misc_feature 1..17: note = Oligonucleotide
  source 1..17: mol_type = other DNA
ttagatggagcgacgca

SEQ ID NO: 24599 - DNA, 17 bp, synthetic construct
  misc_feature 1..17: note = Oligonucleotide
  source 1..17: mol_type = other DNA
gtgttagatggagcgac

SEQ ID NO: 24600 - DNA, 17 bp, synthetic construct
  misc_feature 1..17: note = Oligonucleotide
  source 1..17: mol_type = other DNA
tatgtgttagatggagc

SEQ ID NO: 24601 - DNA, 17 bp, synthetic construct
  misc_feature 1..17: note = Oligonucleotide
  source 1..17: mol_type = other DNA
gcctatgtgttagatgg

SEQ ID NO: 24602 - DNA, 17 bp, synthetic construct
  misc_feature 1..17: note = Oligonucleotide
  source 1..17: mol_type = other DNA
acagcctatgtgttaga

SEQ ID NO: 24603 - DNA, 17 bp, synthetic construct
  misc_feature 1..17: note = Oligonucleotide
  source 1..17: mol_type = other DNA
cccacagcctatgtgtt

SEQ ID NO: 24604 - DNA, 17 bp, synthetic construct
  misc_feature 1..17: note = Oligonucleotide
  source 1..17: mol_type = other DNA
acacccacagcctatgt

SEQ ID NO: 24605 - DNA, 17 bp, synthetic construct
  misc_feature 1..17: note = Oligonucleotide
  source 1..17: mol_type = other DNA
tgaacacccacagccta

SEQ ID NO: 24606 - DNA, 17 bp, synthetic construct
  misc_feature 1..17: note = Oligonucleotide
  source 1..17: mol_type = other DNA
cagtgaacacccacagc

SEQ ID NO: 24607 - DNA, 17 bp, synthetic construct
  misc_feature 1..17: note = Oligonucleotide
  source 1..17: mol_type = other DNA
acgcagtgaacacccac

SEQ ID NO: 24608 - DNA, 17 bp, synthetic construct
  misc_feature 1..17: note = Oligonucleotide
  source 1..17: mol_type = other DNA
aacacgcagtgaacacc

SEQ ID NO: 24609 - DNA, 17 bp, synthetic construct
  misc_feature 1..17: note = Oligonucleotide
  source 1..17: mol_type = other DNA
atgaacacgcagtgaac

SEQ ID NO: 24610 - DNA, 17 bp, synthetic construct
  misc_feature 1..17: note = Oligonucleotide
  source 1..17: mol_type = other DNA
tgtatgaacacgcagtg

SEQ ID NO: 24611 - DNA, 17 bp, synthetic construct
  misc_feature 1..17: note = Oligonucleotide
  source 1..17: mol_type = other DNA
ctgtgtatgaacacgca

SEQ ID NO: 24612 - DNA, 17 bp, synthetic construct
  misc_feature 1..17: note = Oligonucleotide
  source 1..17: mol_type = other DNA
gcactgtgtatgaacac

SEQ ID NO: 24613 - DNA, 17 bp, synthetic construct
  misc_feature 1..17: note = Oligonucleotide
  source 1..17: mol_type = other DNA
cctgcactgtgtatgaa

SEQ ID NO: 24614 - DNA, 17 bp, synthetic construct
  misc_feature 1..17: note = Oligonucleotide
  source 1..17: mol_type = other DNA
ttccctgcactgtgtat

SEQ ID NO: 24615 - DNA, 17 bp, synthetic construct
  misc_feature 1..17: note = Oligonucleotide
  source 1..17: mol_type = other DNA
gcattccctgcactgtg

SEQ ID NO: 24616 - DNA, 17 bp, synthetic construct
  misc_feature 1..17: note = Oligonucleotide
  source 1..17: mol_type = other DNA
gctgcattccctgcact

SEQ ID NO: 24617 - DNA, 17 bp, synthetic construct
  misc_feature 1..17: note = Oligonucleotide
  source 1..17: mol_type = other DNA
cctgctgcattccctgc

SEQ ID NO: 24618 - DNA, 17 bp, synthetic construct
  misc_feature 1..17: note = Oligonucleotide
  source 1..17: mol_type = other DNA
tctcctgctgcattccc

SEQ ID NO: 24619 - DNA, 17 bp, synthetic construct
  misc_feature 1..17: note = Oligonucleotide
  source 1..17: mol_type = other DNA
gggtctcctgctgcatt

SEQ ID NO: 24620 - DNA, 17 bp, synthetic construct
  misc_feature 1..17: note = Oligonucleotide
  source 1..17: mol_type = other DNA
cctgggtctcctgctgc

SEQ ID NO: 24621 - DNA, 17 bp, synthetic construct
  misc_feature 1..17: note = Oligonucleotide
  source 1..17: mol_type = other DNA
cgtcctgggtctcctgc

SEQ ID NO: 24622 - DNA, 17 bp, synthetic construct
  misc_feature 1..17: note = Oligonucleotide
  source 1..17: mol_type = other DNA
gttcgtcctgggtctcc

SEQ ID NO: 24623 - DNA, 17 bp, synthetic construct
  misc_feature 1..17: note = Oligonucleotide
  source 1..17: mol_type = other DNA
ccagttcgtcctgggtc

SEQ ID NO: 24624 - DNA, 17 bp, synthetic construct
  misc_feature 1..17: note = Oligonucleotide
  source 1..17: mol_type = other DNA
tgcccagttcgtcctgg

SEQ ID NO: 24625 - DNA, 17 bp, synthetic construct
  misc_feature 1..17: note = Oligonucleotide
  source 1..17: mol_type = other DNA
ttgtgcccagttcgtcc

SEQ ID NO: 24626 - DNA, 17 bp, synthetic construct
  misc_feature 1..17: note = Oligonucleotide
  source 1..17: mol_type = other DNA
aaattgtgcccagttcg

SEQ ID NO: 24627 - DNA, 17 bp, synthetic construct
  misc_feature 1..17: note = Oligonucleotide
  source 1..17: mol_type = other DNA
gagaaattgtgcccagt

SEQ ID NO: 24628 - DNA, 17 bp, synthetic construct
  misc_feature 1..17: note = Oligonucleotide
  source 1..17: mol_type = other DNA
acagagaaattgtgccc

SEQ ID NO: 24629 - DNA, 17 bp, synthetic construct
  misc_feature 1..17: note = Oligonucleotide
  source 1..17: mol_type = other DNA
tggacagagaaattgtg

SEQ ID NO: 24630 - DNA, 17 bp, synthetic construct
  misc_feature 1..17: note = Oligonucleotide
  source 1..17: mol_type = other DNA
cgctggacagagaaatt

SEQ ID NO: 24631 - DNA, 17 bp, synthetic construct
  misc_feature 1..17: note = Oligonucleotide
  source 1..17: mol_type = other DNA
aaccgctggacagagaa

SEQ ID NO: 24632 - DNA, 17 bp, synthetic construct
  misc_feature 1..17: note = Oligonucleotide
  source 1..17: mol_type = other DNA
cccaaccgctggacaga

SEQ ID NO: 24633 - DNA, 17 bp, synthetic construct
  misc_feature 1..17: note = Oligonucleotide
  source 1..17: mol_type = other DNA
atccccaaccgctggac

SEQ ID NO: 24634 - DNA, 17 bp, synthetic construct
  misc_feature 1..17: note = Oligonucleotide
  source 1..17: mol_type = other DNA
cccatccccaaccgctg

SEQ ID NO: 24635 - DNA, 17 bp, synthetic construct
  misc_feature 1..17: note = Oligonucleotide
  source 1..17: mol_type = other DNA
ccccccatccccaaccg

SEQ ID NO: 24636 - DNA, 17 bp, synthetic construct
  misc_feature 1..17: note = Oligonucleotide
  source 1..17: mol_type = other DNA
cttccccccatccccaa

SEQ ID NO: 24637 - DNA, 17 bp, synthetic construct
  misc_feature 1..17: note = Oligonucleotide
  source 1..17: mol_type = other DNA
tgccttccccccatccc

SEQ ID NO: 24638 - DNA, 17 bp, synthetic construct
  misc_feature 1..17: note = Oligonucleotide
  source 1..17: mol_type = other DNA
gtctgccttccccccat

SEQ ID NO: 24639 - DNA, 17 bp, synthetic construct
  misc_feature 1..17: note = Oligonucleotide
  source 1..17: mol_type = other DNA
taggtctgccttccccc

SEQ ID NO: 24640 - DNA, 17 bp, synthetic construct
  misc_feature 1..17: note = Oligonucleotide
  source 1..17: mol_type = other DNA
ttttaggtctgccttcc

SEQ ID NO: 24641 - DNA, 17 bp, synthetic construct
  misc_feature 1..17: note = Oligonucleotide
  source 1..17: mol_type = other DNA
gatttttaggtctgcct

SEQ ID NO: 24642 - DNA, 17 bp, synthetic construct
  misc_feature 1..17: note = Oligonucleotide
  source 1..17: mol_type = other DNA
cgtgatttttaggtctg

SEQ ID NO: 24643 - DNA, 17 bp, synthetic construct
  misc_feature 1..17: note = Oligonucleotide
  source 1..17: mol_type = other DNA
catcgtgatttttaggt

SEQ ID NO: 24644 - DNA, 17 bp, synthetic construct
  misc_feature 1..17: note = Oligonucleotide
  source 1..17: mol_type = other DNA
catcatcgtgattttta

SEQ ID NO: 24645 - DNA, 17 bp, synthetic construct
  misc_feature 1..17: note = Oligonucleotide
  source 1..17: mol_type = other DNA
catcatcatcgtgattt

SEQ ID NO: 24646 - DNA, 17 bp, synthetic construct
  misc_feature 1..17: note = Oligonucleotide
  source 1..17: mol_type = other DNA
ggtcatcatcatcgtga

SEQ ID NO: 24647 - DNA, 17 bp, synthetic construct
  misc_feature 1..17: note = Oligonucleotide
  source 1..17: mol_type = other DNA
cgaggtcatcatcatcg

SEQ ID NO: 24648 - DNA, 17 bp, synthetic construct
  misc_feature 1..17: note = Oligonucleotide
  source 1..17: mol_type = other DNA
ggccgaggtcatcatca

SEQ ID NO: 24649 - DNA, 17 bp, synthetic construct
  misc_feature 1..17: note = Oligonucleotide
  source 1..17: mol_type = other DNA
gggggccgaggtcatca

SEQ ID NO: 24650 - DNA, 17 bp, synthetic construct
  misc_feature 1..17: note = Oligonucleotide
  source 1..17: mol_type = other DNA
gaagggggccgaggtca

SEQ ID NO: 24651 - DNA, 17 bp, synthetic construct
  misc_feature 1..17: note = Oligonucleotide
  source 1..17: mol_type = other DNA
ggggaagggggccgagg

SEQ ID NO: 24652 - DNA, 17 bp, synthetic construct
  misc_feature 1..17: note = Oligonucleotide
  source 1..17: mol_type = other DNA
atgggggaagggggccg

SEQ ID NO: 24653 - DNA, 17 bp, synthetic construct
  misc_feature 1..17: note = Oligonucleotide
  source 1..17: mol_type = other DNA
ggaatgggggaaggggg

SEQ ID NO: 24654 - DNA, 17 bp, synthetic construct
  misc_feature 1..17: note = Oligonucleotide
  source 1..17: mol_type = other DNA
ctgggaatgggggaagg

SEQ ID NO: 24655 - DNA, 17 bp, synthetic construct
  misc_feature 1..17: note = Oligonucleotide
  source 1..17: mol_type = other DNA
atcctgggaatggggga

SEQ ID NO: 24656 - DNA, 17 bp, synthetic construct
  misc_feature 1..17: note = Oligonucleotide
  source 1..17: mol_type = other DNA
agtatcctgggaatggg

SEQ ID NO: 24657 - DNA, 17 bp, synthetic construct
  misc_feature 1..17: note = Oligonucleotide
  source 1..17: mol_type = other DNA
agcagtatcctgggaat

SEQ ID NO: 24658 - DNA, 17 bp, synthetic construct
  misc_feature 1..17: note = Oligonucleotide
  source 1..17: mol_type = other DNA
tgcagcagtatcctggg

SEQ ID NO: 24659 - DNA, 17 bp, synthetic construct
  misc_feature 1..17: note = Oligonucleotide
  source 1..17: mol_type = other DNA
aactgcagcagtatcct

SEQ ID NO: 24660 - DNA, 17 bp, synthetic construct
  misc_feature 1..17: note = Oligonucleotide
  source 1..17: mol_type = other DNA
ctgaactgcagcagtat

SEQ ID NO: 24661 - DNA, 17 bp, synthetic construct
  misc_feature 1..17: note = Oligonucleotide
  source 1..17: mol_type = other DNA
gggctgaactgcagcag

SEQ ID NO: 24662 - DNA, 17 bp, synthetic construct
  misc_feature 1..17: note = Oligonucleotide
  source 1..17: mol_type = other DNA
gcagggctgaactgcag

SEQ ID NO: 24663 - DNA, 17 bp, synthetic construct
  misc_feature 1..17: note = Oligonucleotide
  source 1..17: mol_type = other DNA
agtgcagggctgaactg

SEQ ID NO: 24664 - DNA, 17 bp, synthetic construct
  misc_feature 1..17: note = Oligonucleotide
  source 1..17: mol_type = other DNA
tacagtgcagggctgaa

SEQ ID NO: 24665 - DNA, 17 bp, synthetic construct
  misc_feature 1..17: note = Oligonucleotide
  source 1..17: mol_type = other DNA
ctttacagtgcagggct

SEQ ID NO: 24666 - DNA, 17 bp, synthetic construct
  misc_feature 1..17: note = Oligonucleotide
  source 1..17: mol_type = other DNA
cacctttacagtgcagg

SEQ ID NO: 24667 - DNA, 17 bp, synthetic construct
  misc_feature 1..17: note = Oligonucleotide
  source 1..17: mol_type = other DNA
tttcacctttacagtgc

SEQ ID NO: 24668 - DNA, 17 bp, synthetic construct
  misc_feature 1..17: note = Oligonucleotide
  source 1..17: mol_type = other DNA
cgatttcacctttacag

SEQ ID NO: 24669 - DNA, 17 bp, synthetic construct
  misc_feature 1..17: note = Oligonucleotide
  source 1..17: mol_type = other DNA
gggcgatttcaccttta

SEQ ID NO: 24670 - DNA, 17 bp, synthetic construct
  misc_feature 1..17: note = Oligonucleotide
  source 1..17: mol_type = other DNA
gtggggcgatttcacct

SEQ ID NO: 24671 - DNA, 17 bp, synthetic construct
  misc_feature 1..17: note = Oligonucleotide
  source 1..17: mol_type = other DNA
attgtggggcgatttca

SEQ ID NO: 24672 - DNA, 17 bp, synthetic construct
  misc_feature 1..17: note = Oligonucleotide
  source 1..17: mol_type = other DNA
actattgtggggcgatt

SEQ ID NO: 24673 - DNA, 17 bp, synthetic construct
  misc_feature 1..17: note = Oligonucleotide
  source 1..17: mol_type = other DNA
gcaactattgtggggcg

SEQ ID NO: 24674 - DNA, 17 bp, synthetic construct
  misc_feature 1..17: note = Oligonucleotide
  source 1..17: mol_type = other DNA
cctgcaactattgtggg

SEQ ID NO: 24675 - DNA, 17 bp, synthetic construct
  misc_feature 1..17: note = Oligonucleotide
  source 1..17: mol_type = other DNA
cagcctgcaactattgt

SEQ ID NO: 24676 - DNA, 17 bp, synthetic construct
  misc_feature 1..17: note = Oligonucleotide
  source 1..17: mol_type = other DNA
ggacagcctgcaactat

SEQ ID NO: 24677 - DNA, 17 bp, synthetic construct
  misc_feature 1..17: note = Oligonucleotide
  source 1..17: mol_type = other DNA
agaggacagcctgcaac

SEQ ID NO: 24678 - DNA, 17 bp, synthetic construct
  misc_feature 1..17: note = Oligonucleotide
  source 1..17: mol_type = other DNA
tcaagaggacagcctgc

SEQ ID NO: 24679 - DNA, 17 bp, synthetic construct
  misc_feature 1..17: note = Oligonucleotide
  source 1..17: mol_type = other DNA
atgtcaagaggacagcc

SEQ ID NO: 24680 - DNA, 17 bp, synthetic construct
  misc_feature 1..17: note = Oligonucleotide
  source 1..17: mol_type = other DNA
ctcatgtcaagaggaca

SEQ ID NO: 24681 - DNA, 17 bp, synthetic construct
  misc_feature 1..17: note = Oligonucleotide
  source 1..17: mol_type = other DNA
ttcctcatgtcaagagg

SEQ ID NO: 24682 - DNA, 17 bp, synthetic construct
  misc_feature 1..17: note = Oligonucleotide
  source 1..17: mol_type = other DNA
agtttcctcatgtcaag

SEQ ID NO: 24683 - DNA, 17 bp, synthetic construct
  misc_feature 1..17: note = Oligonucleotide
  source 1..17: mol_type = other DNA
ttcagtttcctcatgtc

SEQ ID NO: 24684 - DNA, 17 bp, synthetic construct
  misc_feature 1..17: note = Oligonucleotide
  source 1..17: mol_type = other DNA
aacttcagtttcctcat

SEQ ID NO: 24685 - DNA, 17 bp, synthetic construct
  misc_feature 1..17: note = Oligonucleotide
  source 1..17: mol_type = other DNA
aggaacttcagtttcct

SEQ ID NO: 24686 - DNA, 17 bp, synthetic construct
  misc_feature 1..17: note = Oligonucleotide
  source 1..17: mol_type = other DNA
tctaggaacttcagttt

SEQ ID NO: 24687 - DNA, 17 bp, synthetic construct
  misc_feature 1..17: note = Oligonucleotide
  source 1..17: mol_type = other DNA
gcctctaggaacttcag

SEQ ID NO: 24688 - DNA, 17 bp, synthetic construct
  misc_feature 1..17: note = Oligonucleotide
  source 1..17: mol_type = other DNA
gaagcctctaggaactt

SEQ ID NO: 24689 - DNA, 17 bp, synthetic construct
  misc_feature 1..17: note = Oligonucleotide
  source 1..17: mol_type = other DNA
tcagaagcctctaggaa

SEQ ID NO: 24690 - DNA, 17 bp, synthetic construct
  misc_feature 1..17: note = Oligonucleotide
  source 1..17: mol_type = other DNA
acttcagaagcctctag

SEQ ID NO: 24691 - DNA, 17 bp, synthetic construct
  misc_feature 1..17: note = Oligonucleotide
  source 1..17: mol_type = other DNA
ggaacttcagaagcctc

SEQ ID NO: 24692 - DNA, 17 bp, synthetic construct
  misc_feature 1..17: note = Oligonucleotide
  source 1..17: mol_type = other DNA
ccaggaacttcagaagc

SEQ ID NO: 24693 - DNA, 17 bp, synthetic construct
  misc_feature 1..17: note = Oligonucleotide
  source 1..17: mol_type = other DNA
ctgccaggaacttcaga

SEQ ID NO: 24694 - DNA, 17 bp, synthetic construct
  misc_feature 1..17: note = Oligonucleotide
  source 1..17: mol_type = other DNA
gatctgccaggaacttc

SEQ ID NO: 24695 - DNA, 17 bp, synthetic construct
  misc_feature 1..17: note = Oligonucleotide
  source 1..17: mol_type = other DNA
ttagatctgccaggaac

SEQ ID NO: 24696 - DNA, 17 bp, synthetic construct
  misc_feature 1..17: note = Oligonucleotide
  source 1..17: mol_type = other DNA
attttagatctgccagg

SEQ ID NO: 24697 - DNA, 17 bp, synthetic construct
  misc_feature 1..17: note = Oligonucleotide
  source 1..17: mol_type = other DNA
tgaattttagatctgcc

SEQ ID NO: 24698 - DNA, 17 bp, synthetic construct
  misc_feature 1..17: note = Oligonucleotide
  source 1..17: mol_type = other DNA
gcttgaattttagatct

SEQ ID NO: 24699 - DNA, 17 bp, synthetic construct
  misc_feature 1..17: note = Oligonucleotide
  source 1..17: mol_type = other DNA
taggcttgaattttaga

SEQ ID NO: 24700 - DNA, 17 bp, synthetic construct
  misc_feature 1..17: note = Oligonucleotide
  source 1..17: mol_type = other DNA
acctaggcttgaatttt

SEQ ID NO: 24701 - DNA, 17 bp, synthetic construct
  misc_feature 1..17: note = Oligonucleotide
  source 1..17: mol_type = other DNA
cagacctaggcttgaat

SEQ ID NO: 24702 - DNA, 17 bp, synthetic construct
  misc_feature 1..17: note = Oligonucleotide
  source 1..17: mol_type = other DNA
gtacagacctaggcttg

SEQ ID NO: 24703 - DNA, 17 bp, synthetic construct
  misc_feature 1..17: note = Oligonucleotide
  source 1..17: mol_type = other DNA
tgtgtacagacctaggc

SEQ ID NO: 24704 - DNA, 17 bp, synthetic construct
  misc_feature 1..17: note = Oligonucleotide
  source 1..17: mol_type = other DNA
ttttgtgtacagaccta

SEQ ID NO: 24705 - DNA, 17 bp, synthetic construct
  misc_feature 1..17: note = Oligonucleotide
  source 1..17: mol_type = other DNA
ggcttttgtgtacagac

SEQ ID NO: 24706 - DNA, 17 bp, synthetic construct
  misc_feature 1..17: note = Oligonucleotide
  source 1..17: mol_type = other DNA
gtgggcttttgtgtaca

SEQ ID NO: 24707 - DNA, 17 bp, synthetic construct
  misc_feature 1..17: note = Oligonucleotide
  source 1..17: mol_type = other DNA
agggtgggcttttgtgt

SEQ ID NO: 24708 - DNA, 17 bp, synthetic construct
  misc_feature 1..17: note = Oligonucleotide
  source 1..17: mol_type = other DNA
ccaagggtgggcttttg

SEQ ID NO: 24709 - DNA, 17 bp, synthetic construct
  misc_feature 1..17: note = Oligonucleotide
  source 1..17: mol_type = other DNA
gtaccaagggtgggctt

SEQ ID NO: 24710 - DNA, 17 bp, synthetic construct
  misc_feature 1..17: note = Oligonucleotide
  source 1..17: mol_type = other DNA
aaggtaccaagggtggg

SEQ ID NO: 24711 - DNA, 17 bp, synthetic construct
  misc_feature 1..17: note = Oligonucleotide
  source 1..17: mol_type = other DNA
gccaaggtaccaagggt

SEQ ID NO: 24712 - DNA, 17 bp, synthetic construct
  misc_feature 1..17: note = Oligonucleotide
  source 1..17: mol_type = other DNA
gtagccaaggtaccaag

SEQ ID NO: 24713 - DNA, 17 bp, synthetic construct
  misc_feature 1..17: note = Oligonucleotide
  source 1..17: mol_type = other DNA
tttgtagccaaggtacc

SEQ ID NO: 24714 - DNA, 17 bp, synthetic construct
  misc_feature 1..17: note = Oligonucleotide
  source 1..17: mol_type = other DNA
ctctttgtagccaaggt

SEQ ID NO: 24715 - DNA, 17 bp, synthetic construct
  misc_feature 1..17: note = Oligonucleotide
  source 1..17: mol_type = other DNA
tatctctttgtagccaa

SEQ ID NO: 24716 - DNA, 17 bp, synthetic construct
  misc_feature 1..17: note = Oligonucleotide
  source 1..17: mol_type = other DNA
taatatctctttgtagc

SEQ ID NO: 24717 - DNA, 17 bp, synthetic construct
  misc_feature 1..17: note = Oligonucleotide
  source 1..17: mol_type = other DNA
gcataatatctctttgt

SEQ ID NO: 24718 - DNA, 17 bp, synthetic construct
  misc_feature 1..17: note = Oligonucleotide
  source 1..17: mol_type = other DNA
tgggcataatatctctt

SEQ ID NO: 24719 - DNA, 17 bp, synthetic construct
  misc_feature 1..17: note = Oligonucleotide
  source 1..17: mol_type = other DNA
tgctgggcataatatct

SEQ ID NO: 24720 - DNA, 17 bp, synthetic construct
  misc_feature 1..17: note = Oligonucleotide
  source 1..17: mol_type = other DNA
tcttgctgggcataata

SEQ ID NO: 24721 - DNA, 17 bp, synthetic construct
  misc_feature 1..17: note = Oligonucleotide
  source 1..17: mol_type = other DNA
gcttcttgctgggcata

SEQ ID NO: 24722 - DNA, 17 bp, synthetic construct
  misc_feature 1..17: note = Oligonucleotide
  source 1..17: mol_type = other DNA
actgcttcttgctgggc

SEQ ID NO: 24723 - DNA, 17 bp, synthetic construct
  misc_feature 1..17: note = Oligonucleotide
  source 1..17: mol_type = other DNA
tacactgcttcttgctg

SEQ ID NO: 24724 - DNA, 17 bp, synthetic construct
  misc_feature 1..17: note = Oligonucleotide
  source 1..17: mol_type = other DNA
tactacactgcttcttg

SEQ ID NO: 24725 - DNA, 17 bp, synthetic construct
  misc_feature 1..17: note = Oligonucleotide
  source 1..17: mol_type = other DNA
cagtactacactgcttc

SEQ ID NO: 24726 - DNA, 17 bp, synthetic construct
  misc_feature 1..17: note = Oligonucleotide
  source 1..17: mol_type = other DNA
ctccagtactacactgc

SEQ ID NO: 24727 - DNA, 17 bp, synthetic construct
  misc_feature 1..17: note = Oligonucleotide
  source 1..17: mol_type = other DNA
ggcctccagtactacac

SEQ ID NO: 24728 - DNA, 17 bp, synthetic construct
  misc_feature 1..17: note = Oligonucleotide
  source 1..17: mol_type = other DNA
tgaggcctccagtacta

SEQ ID NO: 24729 - DNA, 17 bp, synthetic construct
  misc_feature 1..17: note = Oligonucleotide
  source 1..17: mol_type = other DNA
taatgaggcctccagta

SEQ ID NO: 24730 - DNA, 17 bp, synthetic construct
  misc_feature 1..17: note = Oligonucleotide
  source 1..17: mol_type = other DNA
tgctaatgaggcctcca

SEQ ID NO: 24731 - DNA, 17 bp, synthetic construct
  misc_feature 1..17: note = Oligonucleotide
  source 1..17: mol_type = other DNA
cagtgctaatgaggcct

SEQ ID NO: 24732 - DNA, 17 bp, synthetic construct
  misc_feature 1..17: note = Oligonucleotide
  source 1..17: mol_type = other DNA
ccgcagtgctaatgagg

SEQ ID NO: 24733 - DNA, 17 bp, synthetic construct
  misc_feature 1..17: note = Oligonucleotide
  source 1..17: mol_type = other DNA
ccaccgcagtgctaatg

SEQ ID NO: 24734 - DNA, 17 bp, synthetic construct
  misc_feature 1..17: note = Oligonucleotide
  source 1..17: mol_type = other DNA
cagccaccgcagtgcta

SEQ ID NO: 24735 - DNA, 17 bp, synthetic construct
  misc_feature 1..17: note = Oligonucleotide
  source 1..17: mol_type = other DNA
ctccagccaccgcagtg

SEQ ID NO: 24736 - DNA, 17 bp, synthetic construct
  misc_feature 1..17: note = Oligonucleotide
  source 1..17: mol_type = other DNA
ctcctccagccaccgca

SEQ ID NO: 24737 - DNA, 17 bp, synthetic construct
  misc_feature 1..17: note = Oligonucleotide
  source 1..17: mol_type = other DNA
atcctcctccagccacc

SEQ ID NO: 24738 - DNA, 17 bp, synthetic construct
  misc_feature 1..17: note = Oligonucleotide
  source 1..17: mol_type = other DNA
cgcatcctcctccagcc

SEQ ID NO: 24739 - DNA, 17 bp, synthetic construct
  misc_feature 1..17: note = Oligonucleotide
  source 1..17: mol_type = other DNA
gatcgcatcctcctcca

SEQ ID NO: 24740 - DNA, 17 bp, synthetic construct
  misc_feature 1..17: note = Oligonucleotide
  source 1..17: mol_type = other DNA
cctgatcgcatcctcct

SEQ ID NO: 24741 - DNA, 17 bp, synthetic construct
  misc_feature 1..17: note = Oligonucleotide
  source 1..17: mol_type = other DNA
gttcctgatcgcatcct

SEQ ID NO: 24742 - DNA, 17 bp, synthetic construct
  misc_feature 1..17: note = Oligonucleotide
  source 1..17: mol_type = other DNA
cctgttcctgatcgcat

SEQ ID NO: 24743 - DNA, 17 bp, synthetic construct
  misc_feature 1..17: note = Oligonucleotide
  source 1..17: mol_type = other DNA
ctgcctgttcctgatcg

SEQ ID NO: 24744 - DNA, 17 bp, synthetic construct
  misc_feature 1..17: note = Oligonucleotide
  source 1..17: mol_type = other DNA
agactgcctgttcctga

SEQ ID NO: 24745 - DNA, 17 bp, synthetic construct
  misc_feature 1..17: note = Oligonucleotide
  source 1..17: mol_type = other DNA
tacagactgcctgttcc

SEQ ID NO: 24746 - DNA, 17 bp, synthetic construct
  misc_feature 1..17: note = Oligonucleotide
  source 1..17: mol_type = other DNA
aaatacagactgcctgt

SEQ ID NO: 24747 - DNA, 17 bp, synthetic construct
  misc_feature 1..17: note = Oligonucleotide
  source 1..17: mol_type = other DNA
ctaaaatacagactgcc

SEQ ID NO: 24748 - DNA, 17 bp, synthetic construct
  misc_feature 1..17: note = Oligonucleotide
  source 1..17: mol_type = other DNA
tcgctaaaatacagact

SEQ ID NO: 24749 - DNA, 17 bp, synthetic construct
  misc_feature 1..17: note = Oligonucleotide
  source 1..17: mol_type = other DNA
aactcgctaaaatacag

SEQ ID NO: 24750 - DNA, 17 bp, synthetic construct
  misc_feature 1..17: note = Oligonucleotide
  source 1..17: mol_type = other DNA
atgaactcgctaaaata

SEQ ID NO: 24751 - DNA, 17 bp, synthetic construct
  misc_feature 1..17: note = Oligonucleotide
  source 1..17: mol_type = other DNA
tttatgaactcgctaaa

SEQ ID NO: 24752 - DNA, 17 bp, synthetic construct
  misc_feature 1..17: note = Oligonucleotide
  source 1..17: mol_type = other DNA
atttttatgaactcgct

SEQ ID NO: 24753 - DNA, 17 bp, synthetic construct
  misc_feature 1..17: note = Oligonucleotide
  source 1..17: mol_type = other DNA
aacatttttatgaactc

SEQ ID NO: 24754 - DNA, 17 bp, synthetic construct
  misc_feature 1..17: note = Oligonucleotide
  source 1..17: mol_type = other DNA
gtcaacatttttatgaa

SEQ ID NO: 24755 - DNA, 17 bp, synthetic construct
  misc_feature 1..17: note = Oligonucleotide
  source 1..17: mol_type = other DNA
ttggtcaacatttttat

SEQ ID NO: 24756 - DNA, 17 bp, synthetic construct
  misc_feature 1..17: note = Oligonucleotide
  source 1..17: mol_type = other DNA
agattggtcaacatttt

SEQ ID NO: 24757 - DNA, 17 bp, synthetic construct
  misc_feature 1..17: note = Oligonucleotide
  source 1..17: mol_type = other DNA
ctgagattggtcaacat

SEQ ID NO: 24758 - DNA, 17 bp, synthetic construct
  misc_feature 1..17: note = Oligonucleotide
  source 1..17: mol_type = other DNA
actctgagattggtcaa

SEQ ID NO: 24759 - DNA, 17 bp, synthetic construct
  misc_feature 1..17: note = Oligonucleotide
  source 1..17: mol_type = other DNA
ctcactctgagattggt

SEQ ID NO: 24760 - DNA, 17 bp, synthetic construct
  misc_feature 1..17: note = Oligonucleotide
  source 1..17: mol_type = other DNA
agcctcactctgagatt

SEQ ID NO: 24761 - DNA, 17 bp, synthetic construct
  misc_feature 1..17: note = Oligonucleotide
  source 1..17: mol_type = other DNA
cccagcctcactctgag

SEQ ID NO: 24762 - DNA, 17 bp, synthetic construct
  misc_feature 1..17: note = Oligonucleotide
  source 1..17: mol_type = other DNA
gttcccagcctcactct

SEQ ID NO: 24763 - DNA, 17 bp, synthetic construct
  misc_feature 1..17: note = Oligonucleotide
  source 1..17: mol_type = other DNA
cctgttcccagcctcac

SEQ ID NO: 24764 - DNA, 17 bp, synthetic construct
  misc_feature 1..17: note = Oligonucleotide
  source 1..17: mol_type = other DNA
gctcctgttcccagcct

SEQ ID NO: 24765 - DNA, 17 bp, synthetic construct
  misc_feature 1..17: note = Oligonucleotide
  source 1..17: mol_type = other DNA
ggtgctcctgttcccag

SEQ ID NO: 24766 - DNA, 17 bp, synthetic construct
  misc_feature 1..17: note = Oligonucleotide
  source 1..17: mol_type = other DNA
cgtggtgctcctgttcc

SEQ ID NO: 24767 - DNA, 17 bp, synthetic construct
  misc_feature 1..17: note = Oligonucleotide
  source 1..17: mol_type = other DNA
tctcgtggtgctcctgt

SEQ ID NO: 24768 - DNA, 17 bp, synthetic construct
  misc_feature 1..17: note = Oligonucleotide
  source 1..17: mol_type = other DNA
aggtctcgtggtgctcc

SEQ ID NO: 24769 - DNA, 17 bp, synthetic construct
  misc_feature 1..17: note = Oligonucleotide
  source 1..17: mol_type = other DNA
cccaggtctcgtggtgc

SEQ ID NO: 24770 - DNA, 17 bp, synthetic construct
  misc_feature 1..17: note = Oligonucleotide
  source 1..17: mol_type = other DNA
acacccaggtctcgtgg

SEQ ID NO: 24771 - DNA, 17 bp, synthetic construct
  misc_feature 1..17: note = Oligonucleotide
  source 1..17: mol_type = other DNA
cacacacccaggtctcg

SEQ ID NO: 24772 - DNA, 17 bp, synthetic construct
  misc_feature 1..17: note = Oligonucleotide
  source 1..17: mol_type = other DNA
acccacacacccaggtc

SEQ ID NO: 24773 - DNA, 17 bp, synthetic construct
  misc_feature 1..17: note = Oligonucleotide
  source 1..17: mol_type = other DNA
cacacccacacacccag

SEQ ID NO: 24774 - DNA, 17 bp, synthetic construct
  misc_feature 1..17: note = Oligonucleotide
  source 1..17: mol_type = other DNA
ccccacacccacacacc

SEQ ID NO: 24775 - DNA, 17 bp, synthetic construct
  misc_feature 1..17: note = Oligonucleotide
  source 1..17: mol_type = other DNA
cggccccacacccacac

SEQ ID NO: 24776 - DNA, 17 bp, synthetic construct
  misc_feature 1..17: note = Oligonucleotide
  source 1..17: mol_type = other DNA
ggacggccccacaccca

SEQ ID NO: 24777 - DNA, 17 bp, synthetic construct
  misc_feature 1..17: note = Oligonucleotide
  source 1..17: mol_type = other DNA
ggcggacggccccacac

SEQ ID NO: 24778 - DNA, 17 bp, synthetic construct
  misc_feature 1..17: note = Oligonucleotide
  source 1..17: mol_type = other DNA
gggggcggacggcccca

SEQ ID NO: 24779 - DNA, 17 bp, synthetic construct
  misc_feature 1..17: note = Oligonucleotide
  source 1..17: mol_type = other DNA
gcagggggcggacggcc

SEQ ID NO: 24780 - DNA, 17 bp, synthetic construct
  misc_feature 1..17: note = Oligonucleotide
  source 1..17: mol_type = other DNA
gctgcagggggcggacg

SEQ ID NO: 24781 - DNA, 17 bp, synthetic construct
  misc_feature 1..17: note = Oligonucleotide
  source 1..17: mol_type = other DNA
gaggctgcagggggcgg

SEQ ID NO: 24782 - DNA, 17 bp, synthetic construct
  misc_feature 1..17: note = Oligonucleotide
  source 1..17: mol_type = other DNA
agtgaggctgcaggggg

SEQ ID NO: 24783 - DNA, 17 bp, synthetic construct
  misc_feature 1..17: note = Oligonucleotide
  source 1..17: mol_type = other DNA
ttcagtgaggctgcagg

SEQ ID NO: 24784 - DNA, 17 bp, synthetic construct
  misc_feature 1..17: note = Oligonucleotide
  source 1..17: mol_type = other DNA
gtgttcagtgaggctgc

SEQ ID NO: 24785 - DNA, 17 bp, synthetic construct
  misc_feature 1..17: note = Oligonucleotide
  source 1..17: mol_type = other DNA
ggtgtgttcagtgaggc

SEQ ID NO: 24786 - DNA, 17 bp, synthetic construct
  misc_feature 1..17: note = Oligonucleotide
  source 1..17: mol_type = other DNA
gcaggtgtgttcagtga

SEQ ID NO: 24787 - DNA, 17 bp, synthetic construct
  misc_feature 1..17: note = Oligonucleotide
  source 1..17: mol_type = other DNA
gctgcaggtgtgttcag

SEQ ID NO: 24788 - DNA, 17 bp, synthetic construct
  misc_feature 1..17: note = Oligonucleotide
  source 1..17: mol_type = other DNA
cgtgctgcaggtgtgtt

SEQ ID NO: 24789 - DNA, 17 bp, synthetic construct
  misc_feature 1..17: note = Oligonucleotide
  source 1..17: mol_type = other DNA
acacgtgctgcaggtgt

SEQ ID NO: 24790 - DNA, 17 bp, synthetic construct
  misc_feature 1..17: note = Oligonucleotide
  source 1..17: mol_type = other DNA
gacacacgtgctgcagg

SEQ ID NO: 24791 - DNA, 17 bp, synthetic construct
  misc_feature 1..17: note = Oligonucleotide
  source 1..17: mol_type = other DNA
gcggacacacgtgctgc

SEQ ID NO: 24792 - DNA, 17 bp, synthetic construct
  misc_feature 1..17: note = Oligonucleotide
  source 1..17: mol_type = other DNA
gatgcggacacacgtgc

SEQ ID NO: 24793 - DNA, 17 bp, synthetic construct
  misc_feature 1..17: note = Oligonucleotide
  source 1..17: mol_type = other DNA
catgatgcggacacacg

SEQ ID NO: 24794 - DNA, 17 bp, synthetic construct
  misc_feature 1..17: note = Oligonucleotide
  source 1..17: mol_type = other DNA
catcatgatgcggacac

SEQ ID NO: 24795 - DNA, 17 bp, synthetic construct
  misc_feature 1..17: note = Oligonucleotide
  source 1..17: mol_type = other DNA
ggacatcatgatgcgga

SEQ ID NO: 24796 - DNA, 17 bp, synthetic construct
  misc_feature 1..17: note = Oligonucleotide
  source 1..17: mol_type = other DNA
tgtggacatcatgatgc

SEQ ID NO: 24797 - DNA, 17 bp, synthetic construct
  misc_feature 1..17: note = Oligonucleotide
  source 1..17: mol_type = other DNA
ccctgtggacatcatga

SEQ ID NO: 24798 - DNA, 17 bp, synthetic construct
  misc_feature 1..17: note = Oligonucleotide
  source 1..17: mol_type = other DNA
cacccctgtggacatca

SEQ ID NO: 24799 - DNA, 17 bp, synthetic construct
  misc_feature 1..17: note = Oligonucleotide
  source 1..17: mol_type = other DNA
gaacacccctgtggaca

SEQ ID NO: 24800 - DNA, 17 bp, synthetic construct
  misc_feature 1..17: note = Oligonucleotide
  source 1..17: mol_type = other DNA
cctgaacacccctgtgg

SEQ ID NO: 24801 - DNA, 17 bp, synthetic construct
  misc_feature 1..17: note = Oligonucleotide
  source 1..17: mol_type = other DNA
cctcctgaacacccctg

SEQ ID NO: 24802 - DNA, 17 bp, synthetic construct
  misc_feature 1..17: note = Oligonucleotide
  source 1..17: mol_type = other DNA
caacctcctgaacaccc

SEQ ID NO: 24803 - DNA, 17 bp, synthetic construct
  misc_feature 1..17: note = Oligonucleotide
  source 1..17: mol_type = other DNA
acacaacctcctgaaca

SEQ ID NO: 24804 - DNA, 17 bp, synthetic construct
  misc_feature 1..17: note = Oligonucleotide
  source 1..17: mol_type = other DNA
ctgacacaacctcctga

SEQ ID NO: 24805 - DNA, 17 bp, synthetic construct
  misc_feature 1..17: note = Oligonucleotide
  source 1..17: mol_type = other DNA
aacctgacacaacctcc

SEQ ID NO: 24806 - DNA, 17 bp, synthetic construct
  misc_feature 1..17: note = Oligonucleotide
  source 1..17: mol_type = other DNA
cagaacctgacacaacc

SEQ ID NO: 24807 - DNA, 17 bp, synthetic construct
  misc_feature 1..17: note = Oligonucleotide
  source 1..17: mol_type = other DNA
cagcagaacctgacaca

SEQ ID NO: 24808 - DNA, 17 bp, synthetic construct
  misc_feature 1..17: note = Oligonucleotide
  source 1..17: mol_type = other DNA
gtccagcagaacctgac

SEQ ID NO: 24809 - DNA, 17 bp, synthetic construct
  misc_feature 1..17: note = Oligonucleotide
  source 1..17: mol_type = other DNA
gctgtccagcagaacct

SEQ ID NO: 24810 - DNA, 17 bp, synthetic construct
  misc_feature 1..17: note = Oligonucleotide
  source 1..17: mol_type = other DNA
cctgctgtccagcagaa

SEQ ID NO: 24811 - DNA, 17 bp, synthetic construct
  misc_feature 1..17: note = Oligonucleotide
  source 1..17: mol_type = other DNA
gctcctgctgtccagca

SEQ ID NO: 24812 - DNA, 17 bp, synthetic construct
  misc_feature 1..17: note = Oligonucleotide
  source 1..17: mol_type = other DNA
catgctcctgctgtcca

SEQ ID NO: 24813 - DNA, 17 bp, synthetic construct
  misc_feature 1..17: note = Oligonucleotide
  source 1..17: mol_type = other DNA
cctcatgctcctgctgt

SEQ ID NO: 24814 - DNA, 17 bp, synthetic construct
  misc_feature 1..17: note = Oligonucleotide
  source 1..17: mol_type = other DNA
ggccctcatgctcctgc

SEQ ID NO: 24815 - DNA, 17 bp, synthetic construct
  misc_feature 1..17: note = Oligonucleotide
  source 1..17: mol_type = other DNA
cagggccctcatgctcc

SEQ ID NO: 24816 - DNA, 17 bp, synthetic construct
  misc_feature 1..17: note = Oligonucleotide
  source 1..17: mol_type = other DNA
gctcagggccctcatgc

SEQ ID NO: 24817 - DNA, 17 bp, synthetic construct
  misc_feature 1..17: note = Oligonucleotide
  source 1..17: mol_type = other DNA
agtgctcagggccctca

SEQ ID NO: 24818 - DNA, 17 bp, synthetic construct
  misc_feature 1..17: note = Oligonucleotide
  source 1..17: mol_type = other DNA
tggagtgctcagggccc

SEQ ID NO: 24819 - DNA, 17 bp, synthetic construct
  misc_feature 1..17: note = Oligonucleotide
  source 1..17: mol_type = other DNA
ggctggagtgctcaggg

SEQ ID NO: 24820 - DNA, 17 bp, synthetic construct
  misc_feature 1..17: note = Oligonucleotide
  source 1..17: mol_type = other DNA
aggggctggagtgctca

SEQ ID NO: 24821 - DNA, 17 bp, synthetic construct
  misc_feature 1..17: note = Oligonucleotide
  source 1..17: mol_type = other DNA
tgcaggggctggagtgc

SEQ ID NO: 24822 - DNA, 17 bp, synthetic construct
  misc_feature 1..17: note = Oligonucleotide
  source 1..17: mol_type = other DNA
ctgtgcaggggctggag

SEQ ID NO: 24823 - DNA, 17 bp, synthetic construct
  misc_feature 1..17: note = Oligonucleotide
  source 1..17: mol_type = other DNA
gtcctgtgcaggggctg

SEQ ID NO: 24824 - DNA, 17 bp, synthetic construct
  misc_feature 1..17: note = Oligonucleotide
  source 1..17: mol_type = other DNA
agggtcctgtgcagggg

SEQ ID NO: 24825 - DNA, 17 bp, synthetic construct
  misc_feature 1..17: note = Oligonucleotide
  source 1..17: mol_type = other DNA
gttagggtcctgtgcag

SEQ ID NO: 24826 - DNA, 17 bp, synthetic construct
  misc_feature 1..17: note = Oligonucleotide
  source 1..17: mol_type = other DNA
attgttagggtcctgtg

SEQ ID NO: 24827 - DNA, 17 bp, synthetic construct
  misc_feature 1..17: note = Oligonucleotide
  source 1..17: mol_type = other DNA
atcattgttagggtcct

SEQ ID NO: 24828 - DNA, 17 bp, synthetic construct
  misc_feature 1..17: note = Oligonucleotide
  source 1..17: mol_type = other DNA
gacatcattgttagggt

SEQ ID NO: 24829 - DNA, 17 bp, synthetic construct
  misc_feature 1..17: note = Oligonucleotide
  source 1..17: mol_type = other DNA
tcagacatcattgttag

SEQ ID NO: 24830 - DNA, 17 bp, synthetic construct
  misc_feature 1..17: note = Oligonucleotide
  source 1..17: mol_type = other DNA
tgctcagacatcattgt

SEQ ID NO: 24831 - DNA, 17 bp, synthetic construct
  misc_feature 1..17: note = Oligonucleotide
  source 1..17: mol_type = other DNA
ccttgctcagacatcat

SEQ ID NO: 24832 - DNA, 17 bp, synthetic construct
  misc_feature 1..17: note = Oligonucleotide
  source 1..17: mol_type = other DNA
atgccttgctcagacat

SEQ ID NO: 24833 - DNA, 17 bp, synthetic construct
  misc_feature 1..17: note = Oligonucleotide
  source 1..17: mol_type = other DNA
tgcatgccttgctcaga

SEQ ID NO: 24834 - DNA, 17 bp, synthetic construct
  misc_feature 1..17: note = Oligonucleotide
  source 1..17: mol_type = other DNA
ctctgcatgccttgctc

SEQ ID NO: 24835 - DNA, 17 bp, synthetic construct
  misc_feature 1..17: note = Oligonucleotide
  source 1..17: mol_type = other DNA
cccctctgcatgccttg

SEQ ID NO: 24836 - DNA, 17 bp, synthetic construct
  misc_feature 1..17: note = Oligonucleotide
  source 1..17: mol_type = other DNA
acccccctctgcatgcc

SEQ ID NO: 24837 - DNA, 17 bp, synthetic construct
  misc_feature 1..17: note = Oligonucleotide
  source 1..17: mol_type = other DNA
gtaacccccctctgcat

SEQ ID NO: 24838 - DNA, 17 bp, synthetic construct
  misc_feature 1..17: note = Oligonucleotide
  source 1..17: mol_type = other DNA
tcagtaacccccctctg

SEQ ID NO: 24839 - DNA, 17 bp, synthetic construct
  misc_feature 1..17: note = Oligonucleotide
  source 1..17: mol_type = other DNA
gcttcagtaacccccct

SEQ ID NO: 24840 - DNA, 17 bp, synthetic construct
  misc_feature 1..17: note = Oligonucleotide
  source 1..17: mol_type = other DNA
tgagcttcagtaacccc

SEQ ID NO: 24841 - DNA, 17 bp, synthetic construct
  misc_feature 1..17: note = Oligonucleotide
  source 1..17: mol_type = other DNA
ctttgagcttcagtaac

SEQ ID NO: 24842 - DNA, 17 bp, synthetic construct
  misc_feature 1..17: note = Oligonucleotide
  source 1..17: mol_type = other DNA
cccctttgagcttcagt

SEQ ID NO: 24843 - DNA, 17 bp, synthetic construct
  misc_feature 1..17: note = Oligonucleotide
  source 1..17: mol_type = other DNA
gagcccctttgagcttc

SEQ ID NO: 24844 - DNA, 17 bp, synthetic construct
  misc_feature 1..17: note = Oligonucleotide
  source 1..17: mol_type = other DNA
cctgagcccctttgagc

SEQ ID NO: 24845 - DNA, 17 bp, synthetic construct
  misc_feature 1..17: note = Oligonucleotide
  source 1..17: mol_type = other DNA
ggccctgagcccctttg

SEQ ID NO: 24846 - DNA, 17 bp, synthetic construct
  misc_feature 1..17: note = Oligonucleotide
  source 1..17: mol_type = other DNA
ccaggccctgagcccct

SEQ ID NO: 24847 - DNA, 17 bp, synthetic construct
  misc_feature 1..17: note = Oligonucleotide
  source 1..17: mol_type = other DNA
aggccaggccctgagcc

SEQ ID NO: 24848 - DNA, 17 bp, synthetic construct
  misc_feature 1..17: note = Oligonucleotide
  source 1..17: mol_type = other DNA
cccaggccaggccctga

SEQ ID NO: 24849 - DNA, 17 bp, synthetic construct
  misc_feature 1..17: note = Oligonucleotide
  source 1..17: mol_type = other DNA
gaccccaggccaggccc

SEQ ID NO: 24850 - DNA, 17 bp, synthetic construct
  misc_feature 1..17: note = Oligonucleotide
  source 1..17: mol_type = other DNA
cgtgaccccaggccagg

SEQ ID NO: 24851 - DNA, 17 bp, synthetic construct
  misc_feature 1..17: note = Oligonucleotide
  source 1..17: mol_type = other DNA
cagcgtgaccccaggcc

SEQ ID NO: 24852 - DNA, 17 bp, synthetic construct
  misc_feature 1..17: note = Oligonucleotide
  source 1..17: mol_type = other DNA
tggcagcgtgaccccag

SEQ ID NO: 24853 - DNA, 17 bp, synthetic construct
  misc_feature 1..17: note = Oligonucleotide
  source 1..17: mol_type = other DNA
tactggcagcgtgaccc

SEQ ID NO: 24854 - DNA, 17 bp, synthetic construct
  misc_feature 1..17: note = Oligonucleotide
  source 1..17: mol_type = other DNA
ccctactggcagcgtga

SEQ ID NO: 24855 - DNA, 17 bp, synthetic construct
  misc_feature 1..17: note = Oligonucleotide
  source 1..17: mol_type = other DNA
aacccctactggcagcg

SEQ ID NO: 24856 - DNA, 17 bp, synthetic construct
  misc_feature 1..17: note = Oligonucleotide
  source 1..17: mol_type = other DNA
tttaacccctactggca

SEQ ID NO: 24857 - DNA, 17 bp, synthetic construct
  misc_feature 1..17: note = Oligonucleotide
  source 1..17: mol_type = other DNA
cattttaacccctactg

SEQ ID NO: 24858 - DNA, 17 bp, synthetic construct
  misc_feature 1..17: note = Oligonucleotide
  source 1..17: mol_type = other DNA
tttcattttaaccccta

SEQ ID NO: 24859 - DNA, 17 bp, synthetic construct
  misc_feature 1..17: note = Oligonucleotide
  source 1..17: mol_type = other DNA
atgtttcattttaaccc

SEQ ID NO: 24860 - DNA, 17 bp, synthetic construct
  misc_feature 1..17: note = Oligonucleotide
  source 1..17: mol_type = other DNA
agcatgtttcattttaa

SEQ ID NO: 24861 - DNA, 17 bp, synthetic construct
  misc_feature 1..17: note = Oligonucleotide
  source 1..17: mol_type = other DNA
cccagcatgtttcattt

SEQ ID NO: 24862 - DNA, 17 bp, synthetic construct
  misc_feature 1..17: note = Oligonucleotide
  source 1..17: mol_type = other DNA
gcacccagcatgtttca

SEQ ID NO: 24863 - DNA, 17 bp, synthetic construct
  misc_feature 1..17: note = Oligonucleotide
  source 1..17: mol_type = other DNA
tgagcacccagcatgtt

SEQ ID NO: 24864 - DNA, 17 bp, synthetic construct
  misc_feature 1..17: note = Oligonucleotide
  source 1..17: mol_type = other DNA
ggctgagcacccagcat

SEQ ID NO: 24865 - DNA, 17 bp, synthetic construct
  misc_feature 1..17: note = Oligonucleotide
  source 1..17: mol_type = other DNA
gcaggctgagcacccag

SEQ ID NO: 24866 - DNA, 17 bp, synthetic construct
  misc_feature 1..17: note = Oligonucleotide
  source 1..17: mol_type = other DNA
actgcaggctgagcacc

SEQ ID NO: 24867 - DNA, 17 bp, synthetic construct
  misc_feature 1..17: note = Oligonucleotide
  source 1..17: mol_type = other DNA
ggaactgcaggctgagc

SEQ ID NO: 24868 - DNA, 17 bp, synthetic construct
  misc_feature 1..17: note = Oligonucleotide
  source 1..17: mol_type = other DNA
aatggaactgcaggctg

SEQ ID NO: 24869 - DNA, 17 bp, synthetic construct
  misc_feature 1..17: note = Oligonucleotide
  source 1..17: mol_type = other DNA
caaaatggaactgcagg

SEQ ID NO: 24870 - DNA, 17 bp, synthetic construct
  misc_feature 1..17: note = Oligonucleotide
  source 1..17: mol_type = other DNA
aatcaaaatggaactgc

SEQ ID NO: 24871 - DNA, 17 bp, synthetic construct
  misc_feature 1..17: note = Oligonucleotide
  source 1..17: mol_type = other DNA
atcaatcaaaatggaac

SEQ ID NO: 24872 - DNA, 17 bp, synthetic construct
  misc_feature 1..17: note = Oligonucleotide
  source 1..17: mol_type = other DNA
cggatcaatcaaaatgg

SEQ ID NO: 24873 - DNA, 17 bp, synthetic construct
  misc_feature 1..17: note = Oligonucleotide
  source 1..17: mol_type = other DNA
ggacggatcaatcaaaa

SEQ ID NO: 24874 - DNA, 17 bp, synthetic construct
  misc_feature 1..17: note = Oligonucleotide
  source 1..17: mol_type = other DNA
aacggacggatcaatca

SEQ ID NO: 24875 - DNA, 17 bp, synthetic construct
  misc_feature 1..17: note = Oligonucleotide
  source 1..17: mol_type = other DNA
aagaacggacggatcaa

SEQ ID NO: 24876 - DNA, 17 bp, synthetic construct
  misc_feature 1..17: note = Oligonucleotide
  source 1..17: mol_type = other DNA
gggaagaacggacggat

SEQ ID NO: 24877 - DNA, 17 bp, synthetic construct
  misc_feature 1..17: note = Oligonucleotide
  source 1..17: mol_type = other DNA
gaagggaagaacggacg

SEQ ID NO: 24878 - DNA, 17 bp, synthetic construct
  misc_feature 1..17: note = Oligonucleotide
  source 1..17: mol_type = other DNA
ggtgaagggaagaacgg

SEQ ID NO: 24879 - DNA, 17 bp, synthetic construct
  misc_feature 1..17: note = Oligonucleotide
  source 1..17: mol_type = other DNA
gtgggtgaagggaagaa

SEQ ID NO: 24880 - DNA, 17 bp, synthetic construct
  misc_feature 1..17: note = Oligonucleotide
  source 1..17: mol_type = other DNA
tgagtgggtgaagggaa

SEQ ID NO: 24881 - DNA, 17 bp, synthetic construct
  misc_feature 1..17: note = Oligonucleotide
  source 1..17: mol_type = other DNA
gggtgagtgggtgaagg

SEQ ID NO: 24882 - DNA, 17 bp, synthetic construct
  misc_feature 1..17: note = Oligonucleotide
  source 1..17: mol_type = other DNA
catgggtgagtgggtga

SEQ ID NO: 24883 - DNA, 17 bp, synthetic construct
  misc_feature 1..17: note = Oligonucleotide
  source 1..17: mol_type = other DNA
ccgcatgggtgagtggg

SEQ ID NO: 24884 - DNA, 17 bp, synthetic construct
  misc_feature 1..17: note = Oligonucleotide
  source 1..17: mol_type = other DNA
gacccgcatgggtgagt

SEQ ID NO: 24885 - DNA, 17 bp, synthetic construct
  misc_feature 1..17: note = Oligonucleotide
  source 1..17: mol_type = other DNA
agagacccgcatgggtg

SEQ ID NO: 24886 - DNA, 17 bp, synthetic construct
  misc_feature 1..17: note = Oligonucleotide
  source 1..17: mol_type = other DNA
cccagagacccgcatgg

SEQ ID NO: 24887 - DNA, 17 bp, synthetic construct
  misc_feature 1..17: note = Oligonucleotide
  source 1..17: mol_type = other DNA
cctcccagagacccgca

SEQ ID NO: 24888 - DNA, 17 bp, synthetic construct
  misc_feature 1..17: note = Oligonucleotide
  source 1..17: mol_type = other DNA
gctcctcccagagaccc

SEQ ID NO: 24889 - DNA, 17 bp, synthetic construct
  misc_feature 1..17: note = Oligonucleotide
  source 1..17: mol_type = other DNA
gaggctcctcccagaga

SEQ ID NO: 24890 - DNA, 17 bp, synthetic construct
  misc_feature 1..17: note = Oligonucleotide
  source 1..17: mol_type = other DNA
tgagaggctcctcccag

SEQ ID NO: 24891 - DNA, 17 bp, synthetic construct
  misc_feature 1..17: note = Oligonucleotide
  source 1..17: mol_type = other DNA
ccttgagaggctcctcc

SEQ ID NO: 24892 - DNA, 17 bp, synthetic construct
  misc_feature 1..17: note = Oligonucleotide
  source 1..17: mol_type = other DNA
aagccttgagaggctcc

SEQ ID NO: 24893 - DNA, 17 bp, synthetic construct
  misc_feature 1..17: note = Oligonucleotide
  source 1..17: mol_type = other DNA
aggaagccttgagaggc

SEQ ID NO: 24894 - DNA, 17 bp, synthetic construct
  misc_feature 1..17: note = Oligonucleotide
  source 1..17: mol_type = other DNA
tggaggaagccttgaga

SEQ ID NO: 24895 - DNA, 17 bp, synthetic construct
  misc_feature 1..17: note = Oligonucleotide
  source 1..17: mol_type = other DNA
ctgtggaggaagccttg

SEQ ID NO: 24896 - DNA, 17 bp, synthetic construct
  misc_feature 1..17: note = Oligonucleotide
  source 1..17: mol_type = other DNA
gccctgtggaggaagcc

SEQ ID NO: 24897 - DNA, 17 bp, synthetic construct
  misc_feature 1..17: note = Oligonucleotide
  source 1..17: mol_type = other DNA
ggtgccctgtggaggaa

SEQ ID NO: 24898 - DNA, 17 bp, synthetic construct
  misc_feature 1..17: note = Oligonucleotide
  source 1..17: mol_type = other DNA
ggaggtgccctgtggag

SEQ ID NO: 24899 - DNA, 17 bp, synthetic construct
  misc_feature 1..17: note = Oligonucleotide
  source 1..17: mol_type = other DNA
taaggaggtgccctgtg

SEQ ID NO: 24900 - DNA, 17 bp, synthetic construct
  misc_feature 1..17: note = Oligonucleotide
  source 1..17: mol_type = other DNA
aggtaaggaggtgccct

SEQ ID NO: 24901 - DNA, 17 bp, synthetic construct
  misc_feature 1..17: note = Oligonucleotide
  source 1..17: mol_type = other DNA
cccaggtaaggaggtgc

SEQ ID NO: 24902 - DNA, 17 bp, synthetic construct
  misc_feature 1..17: note = Oligonucleotide
  source 1..17: mol_type = other DNA
ccacccaggtaaggagg

SEQ ID NO: 24903 - DNA, 17 bp, synthetic construct
  misc_feature 1..17: note = Oligonucleotide
  source 1..17: mol_type = other DNA
tgcccacccaggtaagg

SEQ ID NO: 24904 - DNA, 17 bp, synthetic construct
  misc_feature 1..17: note = Oligonucleotide
  source 1..17: mol_type = other DNA
taatgcccacccaggta

SEQ ID NO: 24905 - DNA, 17 bp, synthetic construct
  misc_feature 1..17: note = Oligonucleotide
  source 1..17: mol_type = other DNA
acctaatgcccacccag

SEQ ID NO: 24906 - DNA, 17 bp, synthetic construct
  misc_feature 1..17: note = Oligonucleotide
  source 1..17: mol_type = other DNA
aagacctaatgcccacc

SEQ ID NO: 24907 - DNA, 17 bp, synthetic construct
  misc_feature 1..17: note = Oligonucleotide
  source 1..17: mol_type = other DNA
agaaagacctaatgccc

SEQ ID NO: 24908 - DNA, 17 bp, synthetic construct
  misc_feature 1..17: note = Oligonucleotide
  source 1..17: mol_type = other DNA
cagagaaagacctaatg

SEQ ID NO: 24909 - DNA, 17 bp, synthetic construct
  misc_feature 1..17: note = Oligonucleotide
  source 1..17: mol_type = other DNA
cagcagagaaagaccta

SEQ ID NO: 24910 - DNA, 17 bp, synthetic construct
  misc_feature 1..17: note = Oligonucleotide
  source 1..17: mol_type = other DNA
ctccagcagagaaagac

SEQ ID NO: 24911 - DNA, 17 bp, synthetic construct
  misc_feature 1..17: note = Oligonucleotide
  source 1..17: mol_type = other DNA
ggcctccagcagagaaa

SEQ ID NO: 24912 - DNA, 17 bp, synthetic construct
  misc_feature 1..17: note = Oligonucleotide
  source 1..17: mol_type = other DNA
ccaggcctccagcagag

SEQ ID NO: 24913 - DNA, 17 bp, synthetic construct
  misc_feature 1..17: note = Oligonucleotide
  source 1..17: mol_type = other DNA
gagccaggcctccagca

SEQ ID NO: 24914 - DNA, 17 bp, synthetic construct
  misc_feature 1..17: note = Oligonucleotide
  source 1..17: mol_type = other DNA
ctggagccaggcctcca

SEQ ID NO: 24915 - DNA, 17 bp, synthetic construct
  misc_feature 1..17: note = Oligonucleotide
  source 1..17: mol_type = other DNA
ccactggagccaggcct

SEQ ID NO: 24916 - DNA, 17 bp, synthetic construct
  misc_feature 1..17: note = Oligonucleotide
  source 1..17: mol_type = other DNA
tggccactggagccagg

SEQ ID NO: 24917 - DNA, 17 bp, synthetic construct
  misc_feature 1..17: note = Oligonucleotide
  source 1..17: mol_type = other DNA
ctgtggccactggagcc

SEQ ID NO: 24918 - DNA, 17 bp, synthetic construct
  misc_feature 1..17: note = Oligonucleotide
  source 1..17: mol_type = other DNA
gggctgtggccactgga

SEQ ID NO: 24919 - DNA, 17 bp, synthetic construct
  misc_feature 1..17: note = Oligonucleotide
  source 1..17: mol_type = other DNA
gcagggctgtggccact

SEQ ID NO: 24920 - DNA, 17 bp, synthetic construct
  misc_feature 1..17: note = Oligonucleotide
  source 1..17: mol_type = other DNA
gcagcagggctgtggcc

SEQ ID NO: 24921 - DNA, 17 bp, synthetic construct
  misc_feature 1..17: note = Oligonucleotide
  source 1..17: mol_type = other DNA
ggggcagcagggctgtg

SEQ ID NO: 24922 - DNA, 17 bp, synthetic construct
  misc_feature 1..17: note = Oligonucleotide
  source 1..17: mol_type = other DNA
tgaggggcagcagggct

SEQ ID NO: 24923 - DNA, 17 bp, synthetic construct
  misc_feature 1..17: note = Oligonucleotide
  source 1..17: mol_type = other DNA
gggtgaggggcagcagg

SEQ ID NO: 24924 - DNA, 17 bp, synthetic construct
  misc_feature 1..17: note = Oligonucleotide
  source 1..17: mol_type = other DNA
gcagggtgaggggcagc

SEQ ID NO: 24925 - DNA, 17 bp, synthetic construct
  misc_feature 1..17: note = Oligonucleotide
  source 1..17: mol_type = other DNA
ctggcagggtgaggggc

SEQ ID NO: 24926 - DNA, 17 bp, synthetic construct
  misc_feature 1..17: note = Oligonucleotide
  source 1..17: mol_type = other DNA
acactggcagggtgagg

SEQ ID NO: 24927 - DNA, 17 bp, synthetic construct
  misc_feature 1..17: note = Oligonucleotide
  source 1..17: mol_type = other DNA
gacacactggcagggtg

SEQ ID NO: 24928 - DNA, 17 bp, synthetic construct
  misc_feature 1..17: note = Oligonucleotide
  source 1..17: mol_type = other DNA
agtgacacactggcagg

SEQ ID NO: 24929 - DNA, 17 bp, synthetic construct
  misc_feature 1..17: note = Oligonucleotide
  source 1..17: mol_type = other DNA
aggagtgacacactggc

SEQ ID NO: 24930 - DNA, 17 bp, synthetic construct
  misc_feature 1..17: note = Oligonucleotide
  source 1..17: mol_type = other DNA
agcaggagtgacacact

SEQ ID NO: 24931 - DNA, 17 bp, synthetic construct
  misc_feature 1..17: note = Oligonucleotide
  source 1..17: mol_type = other DNA
atgagcaggagtgacac

SEQ ID NO: 24932 - DNA, 17 bp, synthetic construct
  misc_feature 1..17: note = Oligonucleotide
  source 1..17: mol_type = other DNA
gaaatgagcaggagtga

SEQ ID NO: 24933 - DNA, 17 bp, synthetic construct
  misc_feature 1..17: note = Oligonucleotide
  source 1..17: mol_type = other DNA
tcggaaatgagcaggag

SEQ ID NO: 24934 - DNA, 17 bp, synthetic construct
  misc_feature 1..17: note = Oligonucleotide
  source 1..17: mol_type = other DNA
tagtcggaaatgagcag

SEQ ID NO: 24935 - DNA, 17 bp, synthetic construct
  misc_feature 1..17: note = Oligonucleotide
  source 1..17: mol_type = other DNA
agatagtcggaaatgag

SEQ ID NO: 24936 - DNA, 17 bp, synthetic construct
  misc_feature 1..17: note = Oligonucleotide
  source 1..17: mol_type = other DNA
ggaagatagtcggaaat

SEQ ID NO: 24937 - DNA, 17 bp, synthetic construct
  misc_feature 1..17: note = Oligonucleotide
  source 1..17: mol_type = other DNA
agaggaagatagtcgga

SEQ ID NO: 24938 - DNA, 17 bp, synthetic construct
  misc_feature 1..17: note = Oligonucleotide
  source 1..17: mol_type = other DNA
gtgagaggaagatagtc

SEQ ID NO: 24939 - DNA, 17 bp, synthetic construct
  misc_feature 1..17: note = Oligonucleotide
  source 1..17: mol_type = other DNA
gaggtgagaggaagata

SEQ ID NO: 24940 - DNA, 17 bp, synthetic construct
  misc_feature 1..17: note = Oligonucleotide
  source 1..17: mol_type = other DNA
ccagaggtgagaggaag

SEQ ID NO: 24941 - DNA, 17 bp, synthetic construct
  misc_feature 1..17: note = Oligonucleotide
  source 1..17: mol_type = other DNA
caaccagaggtgagagg

SEQ ID NO: 24942 - DNA, 17 bp, synthetic construct
  misc_feature 1..17: note = Oligonucleotide
  source 1..17: mol_type = other DNA
aggcaaccagaggtgag

SEQ ID NO: 24943 - DNA, 17 bp, synthetic construct
  misc_feature 1..17: note = Oligonucleotide
  source 1..17: mol_type = other DNA
tggaggcaaccagaggt

SEQ ID NO: 24944 - DNA, 17 bp, synthetic construct
  misc_feature 1..17: note = Oligonucleotide
  source 1..17: mol_type = other DNA
ccctggaggcaaccaga

SEQ ID NO: 24945 - DNA, 17 bp, synthetic construct
  misc_feature 1..17: note = Oligonucleotide
  source 1..17: mol_type = other DNA
cagccctggaggcaacc

SEQ ID NO: 24946 - DNA, 17 bp, synthetic construct
  misc_feature 1..17: note = Oligonucleotide
  source 1..17: mol_type = other DNA
taccagccctggaggca

SEQ ID NO: 24947 - DNA, 17 bp, synthetic construct
  misc_feature 1..17: note = Oligonucleotide
  source 1..17: mol_type = other DNA
aagtaccagccctggag

SEQ ID NO: 24948 - DNA, 17 bp, synthetic construct
  misc_feature 1..17: note = Oligonucleotide
  source 1..17: mol_type = other DNA
cagaagtaccagccctg

SEQ ID NO: 24949 - DNA, 17 bp, synthetic construct
  misc_feature 1..17: note = Oligonucleotide
  source 1..17: mol_type = other DNA
acgcagaagtaccagcc

SEQ ID NO: 24950 - DNA, 17 bp, synthetic construct
  misc_feature 1..17: note = Oligonucleotide
  source 1..17: mol_type = other DNA
ccgacgcagaagtacca

SEQ ID NO: 24951 - DNA, 17 bp, synthetic construct
  misc_feature 1..17: note = Oligonucleotide
  source 1..17: mol_type = other DNA
aggccgacgcagaagta

SEQ ID NO: 24952 - DNA, 17 bp, synthetic construct
  misc_feature 1..17: note = Oligonucleotide
  source 1..17: mol_type = other DNA
acaaggccgacgcagaa

SEQ ID NO: 24953 - DNA, 17 bp, synthetic construct
  misc_feature 1..17: note = Oligonucleotide
  source 1..17: mol_type = other DNA
tcaacaaggccgacgca

SEQ ID NO: 24954 - DNA, 17 bp, synthetic construct
  misc_feature 1..17: note = Oligonucleotide
  source 1..17: mol_type = other DNA
gaatcaacaaggccgac

SEQ ID NO: 24955 - DNA, 17 bp, synthetic construct
  misc_feature 1..17: note = Oligonucleotide
  source 1..17: mol_type = other DNA
ccagaatcaacaaggcc

SEQ ID NO: 24956 - DNA, 17 bp, synthetic construct
  misc_feature 1..17: note = Oligonucleotide
  source 1..17: mol_type = other DNA
accccagaatcaacaag

SEQ ID NO: 24957 - DNA, 17 bp, synthetic construct
  misc_feature 1..17: note = Oligonucleotide
  source 1..17: mol_type = other DNA
cccaccccagaatcaac

SEQ ID NO: 24958 - DNA, 17 bp, synthetic construct
  misc_feature 1..17: note = Oligonucleotide
  source 1..17: mol_type = other DNA
ctccccaccccagaatc

SEQ ID NO: 24959 - DNA, 17 bp, synthetic construct
  misc_feature 1..17: note = Oligonucleotide
  source 1..17: mol_type = other DNA
gggctccccaccccaga

SEQ ID NO: 24960 - DNA, 17 bp, synthetic construct
  misc_feature 1..17: note = Oligonucleotide
  source 1..17: mol_type = other DNA
acagggctccccacccc

SEQ ID NO: 24961 - DNA, 17 bp, synthetic construct
  misc_feature 1..17: note = Oligonucleotide
  source 1..17: mol_type = other DNA
agtacagggctccccac

SEQ ID NO: 24962 - DNA, 17 bp, synthetic construct
  misc_feature 1..17: note = Oligonucleotide
  source 1..17: mol_type = other DNA
gccagtacagggctccc

SEQ ID NO: 24963 - DNA, 17 bp, synthetic construct
  misc_feature 1..17: note = Oligonucleotide
  source 1..17: mol_type = other DNA
ggggccagtacagggct

SEQ ID NO: 24964 - DNA, 17 bp, synthetic construct
  misc_feature 1..17: note = Oligonucleotide
  source 1..17: mol_type = other DNA
ggaggggccagtacagg

SEQ ID NO: 24965 - DNA, 17 bp, synthetic construct
  misc_feature 1..17: note = Oligonucleotide
  source 1..17: mol_type = other DNA
cttggaggggccagtac

SEQ ID NO: 24966 - DNA, 17 bp, synthetic construct
  misc_feature 1..17: note = Oligonucleotide
  source 1..17: mol_type = other DNA
gggcttggaggggccag

SEQ ID NO: 24967 - DNA, 17 bp, synthetic construct
  misc_feature 1..17: note = Oligonucleotide
  source 1..17: mol_type = other DNA
gaggggcttggaggggc

SEQ ID NO: 24968 - DNA, 17 bp, synthetic construct
  misc_feature 1..17: note = Oligonucleotide
  source 1..17: mol_type = other DNA
gctgaggggcttggagg

SEQ ID NO: 24969 - DNA, 17 bp, synthetic construct
  misc_feature 1..17: note = Oligonucleotide
  source 1..17: mol_type = other DNA
actgctgaggggcttgg

SEQ ID NO: 24970 - DNA, 17 bp, synthetic construct
  misc_feature 1..17: note = Oligonucleotide
  source 1..17: mol_type = other DNA
agaactgctgaggggct

SEQ ID NO: 24971 - DNA, 17 bp, synthetic construct
  misc_feature 1..17: note = Oligonucleotide
  source 1..17: mol_type = other DNA
gacagaactgctgaggg

SEQ ID NO: 24972 - DNA, 17 bp, synthetic construct
  misc_feature 1..17: note = Oligonucleotide
  source 1..17: mol_type = other DNA
ggggacagaactgctga

SEQ ID NO: 24973 - DNA, 17 bp, synthetic construct
  misc_feature 1..17: note = Oligonucleotide
  source 1..17: mol_type = other DNA
catggggacagaactgc

SEQ ID NO: 24974 - DNA, 17 bp, synthetic construct
  misc_feature 1..17: note = Oligonucleotide
  source 1..17: mol_type = other DNA
agacatggggacagaac

SEQ ID NO: 24975 - DNA, 17 bp, synthetic construct
  misc_feature 1..17: note = Oligonucleotide
  source 1..17: mol_type = other DNA
gcaagacatggggacag

SEQ ID NO: 24976 - DNA, 17 bp, synthetic construct
  misc_feature 1..17: note = Oligonucleotide
  source 1..17: mol_type = other DNA
cccgcaagacatgggga

SEQ ID NO: 24977 - DNA, 17 bp, synthetic construct
  misc_feature 1..17: note = Oligonucleotide
  source 1..17: mol_type = other DNA
agccccgcaagacatgg

SEQ ID NO: 24978 - DNA, 17 bp, synthetic construct
  misc_feature 1..17: note = Oligonucleotide
  source 1..17: mol_type = other DNA
gacagccccgcaagaca

SEQ ID NO: 24979 - DNA, 17 bp, synthetic construct
  misc_feature 1..17: note = Oligonucleotide
  source 1..17: mol_type = other DNA
agggacagccccgcaag

SEQ ID NO: 24980 - DNA, 17 bp, synthetic construct
  misc_feature 1..17: note = Oligonucleotide
  source 1..17: mol_type = other DNA
ggcagggacagccccgc

SEQ ID NO: 24981 - DNA, 17 bp, synthetic construct
  misc_feature 1..17: note = Oligonucleotide
  source 1..17: mol_type = other DNA
aaaggcagggacagccc

SEQ ID NO: 24982 - DNA, 17 bp, synthetic construct
  misc_feature 1..17: note = Oligonucleotide
  source 1..17: mol_type = other DNA
cagaaaggcagggacag

SEQ ID NO: 24983 - DNA, 17 bp, synthetic construct
  misc_feature 1..17: note = Oligonucleotide
  source 1..17: mol_type = other DNA
tcccagaaaggcaggga

SEQ ID NO: 24984 - DNA, 17 bp, synthetic construct
  misc_feature 1..17: note = Oligonucleotide
  source 1..17: mol_type = other DNA
atatcccagaaaggcag

SEQ ID NO: 24985 - DNA, 17 bp, synthetic construct
  misc_feature 1..17: note = Oligonucleotide
  source 1..17: mol_type = other DNA
aagatatcccagaaagg

SEQ ID NO: 24986 - DNA, 17 bp, synthetic construct
  misc_feature 1..17: note = Oligonucleotide
  source 1..17: mol_type = other DNA
gagaagatatcccagaa

SEQ ID NO: 24987 - DNA, 17 bp, synthetic construct
  misc_feature 1..17: note = Oligonucleotide
  source 1..17: mol_type = other DNA
cctgagaagatatccca

SEQ ID NO: 24988 - DNA, 17 bp, synthetic construct
  misc_feature 1..17: note = Oligonucleotide
  source 1..17: mol_type = other DNA
ggccctgagaagatatc

SEQ ID NO: 24989 - DNA, 17 bp, synthetic construct
  misc_feature 1..17: note = Oligonucleotide
  source 1..17: mol_type = other DNA
gcaggccctgagaagat

SEQ ID NO: 24990 - DNA, 17 bp, synthetic construct
  misc_feature 1..17: note = Oligonucleotide
  source 1..17: mol_type = other DNA
caagcaggccctgagaa

SEQ ID NO: 24991 - DNA, 17 bp, synthetic construct
  misc_feature 1..17: note = Oligonucleotide
  source 1..17: mol_type = other DNA
catcaagcaggccctga

SEQ ID NO: 24992 - DNA, 17 bp, synthetic construct
  misc_feature 1..17: note = Oligonucleotide
  source 1..17: mol_type = other DNA
ggtcatcaagcaggccc

SEQ ID NO: 24993 - DNA, 17 bp, synthetic construct
  misc_feature 1..17: note = Oligonucleotide
  source 1..17: mol_type = other DNA
cagggtcatcaagcagg

SEQ ID NO: 24994 - DNA, 17 bp, synthetic construct
  misc_feature 1..17: note = Oligonucleotide
  source 1..17: mol_type = other DNA
acccagggtcatcaagc

SEQ ID NO: 24995 - DNA, 17 bp, synthetic construct
  misc_feature 1..17: note = Oligonucleotide
  source 1..17: mol_type = other DNA
caaacccagggtcatca

SEQ ID NO: 24996 - DNA, 17 bp, synthetic construct
  misc_feature 1..17: note = Oligonucleotide
  source 1..17: mol_type = other DNA
gcccaaacccagggtca

SEQ ID NO: 24997 - DNA, 17 bp, synthetic construct
  misc_feature 1..17: note = Oligonucleotide
  source 1..17: mol_type = other DNA
cctgcccaaacccaggg

SEQ ID NO: 24998 - DNA, 17 bp, synthetic construct
  misc_feature 1..17: note = Oligonucleotide
  source 1..17: mol_type = other DNA
agacctgcccaaaccca

SEQ ID NO: 24999 - DNA, 17 bp, synthetic construct
  misc_feature 1..17: note = Oligonucleotide
  source 1..17: mol_type = other DNA
ccaagacctgcccaaac

SEQ ID NO: 25000 - DNA, 17 bp, synthetic construct
  misc_feature 1..17: note = Oligonucleotide
  source 1..17: mol_type = other DNA
gggccaagacctgccca

SEQ ID NO: 25001 - DNA, 17 bp, synthetic construct
  misc_feature 1..17: note = Oligonucleotide
  source 1..17: mol_type = other DNA
ttggggccaagacctgc

SEQ ID NO: 25002 - DNA, 17 bp, synthetic construct
  misc_feature 1..17: note = Oligonucleotide
  source 1..17: mol_type = other DNA
gggttggggccaagacc

SEQ ID NO: 25003 - DNA, 17 bp, synthetic construct
  misc_feature 1..17: note = Oligonucleotide
  source 1..17: mol_type = other DNA
cctgggttggggccaag

SEQ ID NO: 25004 - DNA, 17 bp, synthetic construct
  misc_feature 1..17: note = Oligonucleotide
  source 1..17: mol_type = other DNA
cggcctgggttggggcc

SEQ ID NO: 25005 - DNA, 17 bp, synthetic construct
  misc_feature 1..17: note = Oligonucleotide
  source 1..17: mol_type = other DNA
tgacggcctgggttggg

SEQ ID NO: 25006 - DNA, 17 bp, synthetic construct
  misc_feature 1..17: note = Oligonucleotide
  source 1..17: mol_type = other DNA
ctctgacggcctgggtt

SEQ ID NO: 25007 - DNA, 17 bp, synthetic construct
  misc_feature 1..17: note = Oligonucleotide
  source 1..17: mol_type = other DNA
aaactctgacggcctgg

SEQ ID NO: 25008 - DNA, 17 bp, synthetic construct
  misc_feature 1..17: note = Oligonucleotide
  source 1..17: mol_type = other DNA
cacaaactctgacggcc

SEQ ID NO: 25009 - DNA, 17 bp, synthetic construct
  misc_feature 1..17: note = Oligonucleotide
  source 1..17: mol_type = other DNA
ggacacaaactctgacg

SEQ ID NO: 25010 - DNA, 17 bp, synthetic construct
  misc_feature 1..17: note = Oligonucleotide
  source 1..17: mol_type = other DNA
aaaggacacaaactctg

SEQ ID NO: 25011 - DNA, 17 bp, synthetic construct
  misc_feature 1..17: note = Oligonucleotide
  source 1..17: mol_type = other DNA
gagaaaggacacaaact

SEQ ID NO: 25012 - DNA, 17 bp, synthetic construct
  misc_feature 1..17: note = Oligonucleotide
  source 1..17: mol_type = other DNA
cctgagaaaggacacaa

SEQ ID NO: 25013 - DNA, 17 bp, synthetic construct
  misc_feature 1..17: note = Oligonucleotide
  source 1..17: mol_type = other DNA
acccctgagaaaggaca

SEQ ID NO: 25014 - DNA, 17 bp, synthetic construct
  misc_feature 1..17: note = Oligonucleotide
  source 1..17: mol_type = other DNA
gggacccctgagaaagg

SEQ ID NO: 25015 - DNA, 17 bp, synthetic construct
  misc_feature 1..17: note = Oligonucleotide
  source 1..17: mol_type = other DNA
ccggggacccctgagaa

SEQ ID NO: 25016 - DNA, 17 bp, synthetic construct
  misc_feature 1..17: note = Oligonucleotide
  source 1..17: mol_type = other DNA
ccaccggggacccctga

SEQ ID NO: 25017 - DNA, 17 bp, synthetic construct
  misc_feature 1..17: note = Oligonucleotide
  source 1..17: mol_type = other DNA
gccccaccggggacccc

SEQ ID NO: 25018 - DNA, 17 bp, synthetic construct
  misc_feature 1..17: note = Oligonucleotide
  source 1..17: mol_type = other DNA
agggccccaccggggac

SEQ ID NO: 25019 - DNA, 17 bp, synthetic construct
  misc_feature 1..17: note = Oligonucleotide
  source 1..17: mol_type = other DNA
aggagggccccaccggg

SEQ ID NO: 25020 - DNA, 17 bp, synthetic construct
  misc_feature 1..17: note = Oligonucleotide
  source 1..17: mol_type = other DNA
tggaggagggccccacc

SEQ ID NO: 25021 - DNA, 17 bp, synthetic construct
  misc_feature 1..17: note = Oligonucleotide
  source 1..17: mol_type = other DNA
ggatggaggagggcccc

SEQ ID NO: 25022 - DNA, 17 bp, synthetic construct
  misc_feature 1..17: note = Oligonucleotide
  source 1..17: mol_type = other DNA
acaggatggaggagggc

SEQ ID NO: 25023 - DNA, 17 bp, synthetic construct
  misc_feature 1..17: note = Oligonucleotide
  source 1..17: mol_type = other DNA
gttacaggatggaggag

SEQ ID NO: 25024 - DNA, 17 bp, synthetic construct
  misc_feature 1..17: note = Oligonucleotide
  source 1..17: mol_type = other DNA
tcagttacaggatggag

SEQ ID NO: 25025 - DNA, 17 bp, synthetic construct
  misc_feature 1..17: note = Oligonucleotide
  source 1..17: mol_type = other DNA
cgttcagttacaggatg

SEQ ID NO: 25026 - DNA, 17 bp, synthetic construct
  misc_feature 1..17: note = Oligonucleotide
  source 1..17: mol_type = other DNA
gtgcgttcagttacagg

SEQ ID NO: 25027 - DNA, 17 bp, synthetic construct
  misc_feature 1..17: note = Oligonucleotide
  source 1..17: mol_type = other DNA
ggtgtgcgttcagttac

SEQ ID NO: 25028 - DNA, 17 bp, synthetic construct
  misc_feature 1..17: note = Oligonucleotide
  source 1..17: mol_type = other DNA
agaggtgtgcgttcagt

SEQ ID NO: 25029 - DNA, 17 bp, synthetic construct
  misc_feature 1..17: note = Oligonucleotide
  source 1..17: mol_type = other DNA
gagagaggtgtgcgttc

SEQ ID NO: 25030 - DNA, 17 bp, synthetic construct
  misc_feature 1..17: note = Oligonucleotide
  source 1..17: mol_type = other DNA
caggagagaggtgtgcg

SEQ ID NO: 25031 - DNA, 17 bp, synthetic construct
  misc_feature 1..17: note = Oligonucleotide
  source 1..17: mol_type = other DNA
ggacaggagagaggtgt

SEQ ID NO: 25032 - DNA, 17 bp, synthetic construct
  misc_feature 1..17: note = Oligonucleotide
  source 1..17: mol_type = other DNA
agaggacaggagagagg

SEQ ID NO: 25033 - DNA, 17 bp, synthetic construct
  misc_feature 1..17: note = Oligonucleotide
  source 1..17: mol_type = other DNA
tgaagaggacaggagag

SEQ ID NO: 25034 - DNA, 17 bp, synthetic construct
  misc_feature 1..17: note = Oligonucleotide
  source 1..17: mol_type = other DNA
ttgtgaagaggacagga

SEQ ID NO: 25035 - DNA, 17 bp, synthetic construct
  misc_feature 1..17: note = Oligonucleotide
  source 1..17: mol_type = other DNA
ctcttgtgaagaggaca

SEQ ID NO: 25036 - DNA, 17 bp, synthetic construct
  misc_feature 1..17: note = Oligonucleotide
  source 1..17: mol_type = other DNA
gggctcttgtgaagagg

SEQ ID NO: 25037 - DNA, 17 bp, synthetic construct
  misc_feature 1..17: note = Oligonucleotide
  source 1..17: mol_type = other DNA
ggagggctcttgtgaag

SEQ ID NO: 25038 - DNA, 17 bp, synthetic construct
  misc_feature 1..17: note = Oligonucleotide
  source 1..17: mol_type = other DNA
cggggagggctcttgtg

SEQ ID NO: 25039 - DNA, 17 bp, synthetic construct
  misc_feature 1..17: note = Oligonucleotide
  source 1..17: mol_type = other DNA
gcacggggagggctctt

SEQ ID NO: 25040 - DNA, 17 bp, synthetic construct
  misc_feature 1..17: note = Oligonucleotide
  source 1..17: mol_type = other DNA
gctgcacggggagggct

SEQ ID NO: 25041 - DNA, 17 bp, synthetic construct
  misc_feature 1..17: note = Oligonucleotide
  source 1..17: mol_type = other DNA
agggctgcacggggagg

SEQ ID NO: 25042 - DNA, 17 bp, synthetic construct
  misc_feature 1..17: note = Oligonucleotide
  source 1..17: mol_type = other DNA
cccagggctgcacgggg

SEQ ID NO: 25043 - DNA, 17 bp, synthetic construct
  misc_feature 1..17: note = Oligonucleotide
  source 1..17: mol_type = other DNA
aggcccagggctgcacg

SEQ ID NO: 25044 - DNA, 17 bp, synthetic construct
  misc_feature 1..17: note = Oligonucleotide
  source 1..17: mol_type = other DNA
cccaggcccagggctgc

SEQ ID NO: 25045 - DNA, 17 bp, synthetic construct
  misc_feature 1..17: note = Oligonucleotide
  source 1..17: mol_type = other DNA
tgccccaggcccagggc

SEQ ID NO: 25046 - DNA, 17 bp, synthetic construct
  misc_feature 1..17: note = Oligonucleotide
  source 1..17: mol_type = other DNA
ctgtgccccaggcccag

SEQ ID NO: 25047 - DNA, 17 bp, synthetic construct
  misc_feature 1..17: note = Oligonucleotide
  source 1..17: mol_type = other DNA
gctctgtgccccaggcc

SEQ ID NO: 25048 - DNA, 17 bp, synthetic construct
  misc_feature 1..17: note = Oligonucleotide
  source 1..17: mol_type = other DNA
caagctctgtgccccag

SEQ ID NO: 25049 - DNA, 17 bp, synthetic construct
  misc_feature 1..17: note = Oligonucleotide
  source 1..17: mol_type = other DNA
gcccaagctctgtgccc

SEQ ID NO: 25050 - DNA, 17 bp, synthetic construct
  misc_feature 1..17: note = Oligonucleotide
  source 1..17: mol_type = other DNA
gatgcccaagctctgtg

SEQ ID NO: 25051 - DNA, 17 bp, synthetic construct
  misc_feature 1..17: note = Oligonucleotide
  source 1..17: mol_type = other DNA
ctggatgcccaagctct

SEQ ID NO: 25052 - DNA, 17 bp, synthetic construct
  misc_feature 1..17: note = Oligonucleotide
  source 1..17: mol_type = other DNA
tccctggatgcccaagc

SEQ ID NO: 25053 - DNA, 17 bp, synthetic construct
  misc_feature 1..17: note = Oligonucleotide
  source 1..17: mol_type = other DNA
tggtccctggatgccca

SEQ ID NO: 25054 - DNA, 17 bp, synthetic construct
  misc_feature 1..17: note = Oligonucleotide
  source 1..17: mol_type = other DNA
ggctggtccctggatgc

SEQ ID NO: 25055 - DNA, 17 bp, synthetic construct
  misc_feature 1..17: note = Oligonucleotide
  source 1..17: mol_type = other DNA
ctgggctggtccctgga

SEQ ID NO: 25056 - DNA, 17 bp, synthetic construct
  misc_feature 1..17: note = Oligonucleotide
  source 1..17: mol_type = other DNA
ggtctgggctggtccct

SEQ ID NO: 25057 - DNA, 17 bp, synthetic construct
  misc_feature 1..17: note = Oligonucleotide
  source 1..17: mol_type = other DNA
cctggtctgggctggtc

SEQ ID NO: 25058 - DNA, 17 bp, synthetic construct
  misc_feature 1..17: note = Oligonucleotide
  source 1..17: mol_type = other DNA
gaccctggtctgggctg

SEQ ID NO: 25059 - DNA, 17 bp, synthetic construct
  misc_feature 1..17: note = Oligonucleotide
  source 1..17: mol_type = other DNA
caagaccctggtctggg

SEQ ID NO: 25060 - DNA, 17 bp, synthetic construct
  misc_feature 1..17: note = Oligonucleotide
  source 1..17: mol_type = other DNA
gagcaagaccctggtct

SEQ ID NO: 25061 - DNA, 17 bp, synthetic construct
  misc_feature 1..17: note = Oligonucleotide
  source 1..17: mol_type = other DNA
tccgagcaagaccctgg

SEQ ID NO: 25062 - DNA, 17 bp, synthetic construct
  misc_feature 1..17: note = Oligonucleotide
  source 1..17: mol_type = other DNA
ggctccgagcaagaccc

SEQ ID NO: 25063 - DNA, 17 bp, synthetic construct
  misc_feature 1..17: note = Oligonucleotide
  source 1..17: mol_type = other DNA
ccgggctccgagcaaga

SEQ ID NO: 25064 - DNA, 17 bp, synthetic construct
  misc_feature 1..17: note = Oligonucleotide
  source 1..17: mol_type = other DNA
agcccgggctccgagca

SEQ ID NO: 25065 - DNA, 17 bp, synthetic construct
  misc_feature 1..17: note = Oligonucleotide
  source 1..17: mol_type = other DNA
cagagcccgggctccga

SEQ ID NO: 25066 - DNA, 17 bp, synthetic construct
  misc_feature 1..17: note = Oligonucleotide
  source 1..17: mol_type = other DNA
gcccagagcccgggctc

SEQ ID NO: 25067 - DNA, 17 bp, synthetic construct
  misc_feature 1..17: note = Oligonucleotide
  source 1..17: mol_type = other DNA
ggagcccagagcccggg

SEQ ID NO: 25068 - DNA, 17 bp, synthetic construct
  misc_feature 1..17: note = Oligonucleotide
  source 1..17: mol_type = other DNA
cagggagcccagagccc

SEQ ID NO: 25069 - DNA, 17 bp, synthetic construct
  misc_feature 1..17: note = Oligonucleotide
  source 1..17: mol_type = other DNA
aaacagggagcccagag

SEQ ID NO: 25070 - DNA, 17 bp, synthetic construct
  misc_feature 1..17: note = Oligonucleotide
  source 1..17: mol_type = other DNA
gagaaacagggagccca

SEQ ID NO: 25071 - DNA, 17 bp, synthetic construct
  misc_feature 1..17: note = Oligonucleotide
  source 1..17: mol_type = other DNA
ggggagaaacagggagc

SEQ ID NO: 25072 - DNA, 17 bp, synthetic construct
  misc_feature 1..17: note = Oligonucleotide
  source 1..17: mol_type = other DNA
gcaggggagaaacaggg

SEQ ID NO: 25073 - DNA, 17 bp, synthetic construct
  misc_feature 1..17: note = Oligonucleotide
  source 1..17: mol_type = other DNA
agggcaggggagaaaca

SEQ ID NO: 25074 - DNA, 17 bp, synthetic construct
  misc_feature 1..17: note = Oligonucleotide
  source 1..17: mol_type = other DNA
tggagggcaggggagaa

SEQ ID NO: 25075 - DNA, 17 bp, synthetic construct
  misc_feature 1..17: note = Oligonucleotide
  source 1..17: mol_type = other DNA
gaatggagggcagggga

SEQ ID NO: 25076 - DNA, 17 bp, synthetic construct
  misc_feature 1..17: note = Oligonucleotide
  source 1..17: mol_type = other DNA
ggggaatggagggcagg

SEQ ID NO: 25077 - DNA, 17 bp, synthetic construct
  misc_feature 1..17: note = Oligonucleotide
  source 1..17: mol_type = other DNA
ggcggggaatggagggc

SEQ ID NO: 25078 - DNA, 17 bp, synthetic construct
  misc_feature 1..17: note = Oligonucleotide
  source 1..17: mol_type = other DNA
gtgggcggggaatggag

SEQ ID NO: 25079 - DNA, 17 bp, synthetic construct
  misc_feature 1..17: note = Oligonucleotide
  source 1..17: mol_type = other DNA
gtggtgggcggggaatg

SEQ ID NO: 25080 - DNA, 17 bp, synthetic construct
  misc_feature 1..17: note = Oligonucleotide
  source 1..17: mol_type = other DNA
cccgtggtgggcgggga

SEQ ID NO: 25081 - DNA, 17 bp, synthetic construct
  misc_feature 1..17: note = Oligonucleotide
  source 1..17: mol_type = other DNA
ggacccgtggtgggcgg

SEQ ID NO: 25082 - DNA, 17 bp, synthetic construct
  misc_feature 1..17: note = Oligonucleotide
  source 1..17: mol_type = other DNA
ttgggacccgtggtggg

SEQ ID NO: 25083 - DNA, 17 bp, synthetic construct
  misc_feature 1..17: note = Oligonucleotide
  source 1..17: mol_type = other DNA
gggttgggacccgtggt

SEQ ID NO: 25084 - DNA, 17 bp, synthetic construct
  misc_feature 1..17: note = Oligonucleotide
  source 1..17: mol_type = other DNA
atggggttgggacccgt

SEQ ID NO: 25085 - DNA, 17 bp, synthetic construct
  misc_feature 1..17: note = Oligonucleotide
  source 1..17: mol_type = other DNA
aagatggggttgggacc

SEQ ID NO: 25086 - DNA, 17 bp, synthetic construct
  misc_feature 1..17: note = Oligonucleotide
  source 1..17: mol_type = other DNA
gggaagatggggttggg

SEQ ID NO: 25087 - DNA, 17 bp, synthetic construct
  misc_feature 1..17: note = Oligonucleotide
  source 1..17: mol_type = other DNA
ctcgggaagatggggtt

SEQ ID NO: 25088 - DNA, 17 bp, synthetic construct
  misc_feature 1..17: note = Oligonucleotide
  source 1..17: mol_type = other DNA
atgctcgggaagatggg

SEQ ID NO: 25089 - DNA, 17 bp, synthetic construct
  misc_feature 1..17: note = Oligonucleotide
  source 1..17: mol_type = other DNA
agaatgctcgggaagat

SEQ ID NO: 25090 - DNA, 17 bp, synthetic construct
  misc_feature 1..17: note = Oligonucleotide
  source 1..17: mol_type = other DNA
gctagaatgctcgggaa

SEQ ID NO: 25091 - DNA, 17 bp, synthetic construct
  misc_feature 1..17: note = Oligonucleotide
  source 1..17: mol_type = other DNA
ggagctagaatgctcgg

SEQ ID NO: 25092 - DNA, 17 bp, synthetic construct
  misc_feature 1..17: note = Oligonucleotide
  source 1..17: mol_type = other DNA
cgaggagctagaatgct

SEQ ID NO: 25093 - DNA, 17 bp, synthetic construct
  misc_feature 1..17: note = Oligonucleotide
  source 1..17: mol_type = other DNA
gcgcgaggagctagaat

SEQ ID NO: 25094 - DNA, 17 bp, synthetic construct
  misc_feature 1..17: note = Oligonucleotide
  source 1..17: mol_type = other DNA
ccggcgcgaggagctag

SEQ ID NO: 25095 - DNA, 17 bp, synthetic construct
  misc_feature 1..17: note = Oligonucleotide
  source 1..17: mol_type = other DNA
aacccggcgcgaggagc

SEQ ID NO: 25096 - DNA, 17 bp, synthetic construct
  misc_feature 1..17: note = Oligonucleotide
  source 1..17: mol_type = other DNA
cagaacccggcgcgagg

SEQ ID NO: 25097 - DNA, 17 bp, synthetic construct
  misc_feature 1..17: note = Oligonucleotide
  source 1..17: mol_type = other DNA
cggcagaacccggcgcg

SEQ ID NO: 25098 - DNA, 17 bp, synthetic construct
  misc_feature 1..17: note = Oligonucleotide
  source 1..17: mol_type = other DNA
ccgcggcagaacccggc

SEQ ID NO: 25099 - DNA, 17 bp, synthetic construct
  misc_feature 1..17: note = Oligonucleotide
  source 1..17: mol_type = other DNA
cgcccgcggcagaaccc

SEQ ID NO: 25100 - DNA, 17 bp, synthetic construct
  misc_feature 1..17: note = Oligonucleotide
  source 1..17: mol_type = other DNA
ggacgcccgcggcagaa

SEQ ID NO: 25101 - DNA, 17 bp, synthetic construct
  misc_feature 1..17: note = Oligonucleotide
  source 1..17: mol_type = other DNA
aatggacgcccgcggca

SEQ ID NO: 25102 - DNA, 17 bp, synthetic construct
  misc_feature 1..17: note = Oligonucleotide
  source 1..17: mol_type = other DNA
cacaatggacgcccgcg

SEQ ID NO: 25103 - DNA, 17 bp, synthetic construct
  misc_feature 1..17: note = Oligonucleotide
  source 1..17: mol_type = other DNA
ggacacaatggacgccc

SEQ ID NO: 25104 - DNA, 17 bp, synthetic construct
  misc_feature 1..17: note = Oligonucleotide
  source 1..17: mol_type = other DNA
tccggacacaatggacg

SEQ ID NO: 25105 - DNA, 17 bp, synthetic construct
  misc_feature 1..17: note = Oligonucleotide
  source 1..17: mol_type = other DNA
ccgtccggacacaatgg

SEQ ID NO: 25106 - DNA, 17 bp, synthetic construct
  misc_feature 1..17: note = Oligonucleotide
  source 1..17: mol_type = other DNA
ccaccgtccggacacaa

SEQ ID NO: 25107 - DNA, 17 bp, synthetic construct
  misc_feature 1..17: note = Oligonucleotide
  source 1..17: mol_type = other DNA
aagccaccgtccggaca

SEQ ID NO: 25108 - DNA, 17 bp, synthetic construct
  misc_feature 1..17: note = Oligonucleotide
  source 1..17: mol_type = other DNA
gggaagccaccgtccgg

SEQ ID NO: 25109 - DNA, 17 bp, synthetic construct
  misc_feature 1..17: note = Oligonucleotide
  source 1..17: mol_type = other DNA
ccggggaagccaccgtc

SEQ ID NO: 25110 - DNA, 17 bp, synthetic construct
  misc_feature 1..17: note = Oligonucleotide
  source 1..17: mol_type = other DNA
accccggggaagccacc

SEQ ID NO: 25111 - DNA, 17 bp, synthetic construct
  misc_feature 1..17: note = Oligonucleotide
  source 1..17: mol_type = other DNA
tccaccccggggaagcc

SEQ ID NO: 25112 - DNA, 17 bp, synthetic construct
  misc_feature 1..17: note = Oligonucleotide
  source 1..17: mol_type = other DNA
gactccaccccggggaa

SEQ ID NO: 25113 - DNA, 17 bp, synthetic construct
  misc_feature 1..17: note = Oligonucleotide
  source 1..17: mol_type = other DNA
cccgactccaccccggg

SEQ ID NO: 25114 - DNA, 17 bp, synthetic construct
  misc_feature 1..17: note = Oligonucleotide
  source 1..17: mol_type = other DNA
tgacccgactccacccc

SEQ ID NO: 25115 - DNA, 17 bp, synthetic construct
  misc_feature 1..17: note = Oligonucleotide
  source 1..17: mol_type = other DNA
ccttgacccgactccac

SEQ ID NO: 25116 - DNA, 17 bp, synthetic construct
  misc_feature 1..17: note = Oligonucleotide
  source 1..17: mol_type = other DNA
cagccttgacccgactc

SEQ ID NO: 25117 - DNA, 17 bp, synthetic construct
  misc_feature 1..17: note = Oligonucleotide
  source 1..17: mol_type = other DNA
ggccagccttgacccga

SEQ ID NO: 25118 - DNA, 17 bp, synthetic construct
  misc_feature 1..17: note = Oligonucleotide
  source 1..17: mol_type = other DNA
agaggccagccttgacc

SEQ ID NO: 25119 - DNA, 17 bp, synthetic construct
  misc_feature 1..17: note = Oligonucleotide
  source 1..17: mol_type = other DNA
cacagaggccagccttg

SEQ ID NO: 25120 - DNA, 17 bp, synthetic construct
  misc_feature 1..17: note = Oligonucleotide
  source 1..17: mol_type = other DNA
tcccacagaggccagcc

SEQ ID NO: 25121 - DNA, 17 bp, synthetic construct
  misc_feature 1..17: note = Oligonucleotide
  source 1..17: mol_type = other DNA
ccctcccacagaggcca

SEQ ID NO: 25122 - DNA, 17 bp, synthetic construct
  misc_feature 1..17: note = Oligonucleotide
  source 1..17: mol_type = other DNA
accccctcccacagagg

SEQ ID NO: 25123 - DNA, 17 bp, synthetic construct
  misc_feature 1..17: note = Oligonucleotide
  source 1..17: mol_type = other DNA
gcaaccccctcccacag

SEQ ID NO: 25124 - DNA, 17 bp, synthetic construct
  misc_feature 1..17: note = Oligonucleotide
  source 1..17: mol_type = other DNA
ccggcaaccccctccca

SEQ ID NO: 25125 - DNA, 17 bp, synthetic construct
  misc_feature 1..17: note = Oligonucleotide
  source 1..17: mol_type = other DNA
accccggcaaccccctc

SEQ ID NO: 25126 - DNA, 17 bp, synthetic construct
  misc_feature 1..17: note = Oligonucleotide
  source 1..17: mol_type = other DNA
gggaccccggcaacccc

SEQ ID NO: 25127 - DNA, 17 bp, synthetic construct
  misc_feature 1..17: note = Oligonucleotide
  source 1..17: mol_type = other DNA
ctggggaccccggcaac

SEQ ID NO: 25128 - DNA, 17 bp, synthetic construct
  misc_feature 1..17: note = Oligonucleotide
  source 1..17: mol_type = other DNA
ttcctggggaccccggc

SEQ ID NO: 25129 - DNA, 17 bp, synthetic construct
  misc_feature 1..17: note = Oligonucleotide
  source 1..17: mol_type = other DNA
aggttcctggggacccc

SEQ ID NO: 25130 - DNA, 17 bp, synthetic construct
  misc_feature 1..17: note = Oligonucleotide
  source 1..17: mol_type = other DNA
gagaggttcctggggac

SEQ ID NO: 25131 - DNA, 17 bp, synthetic construct
  misc_feature 1..17: note = Oligonucleotide
  source 1..17: mol_type = other DNA
tcggagaggttcctggg

SEQ ID NO: 25132 - DNA, 17 bp, synthetic construct
  misc_feature 1..17: note = Oligonucleotide
  source 1..17: mol_type = other DNA
ccttcggagaggttcct

SEQ ID NO: 25133 - DNA, 17 bp, synthetic construct
  misc_feature 1..17: note = Oligonucleotide
  source 1..17: mol_type = other DNA
ctgccttcggagaggtt

SEQ ID NO: 25134 - DNA, 17 bp, synthetic construct
  misc_feature 1..17: note = Oligonucleotide
  source 1..17: mol_type = other DNA
gtgctgccttcggagag

SEQ ID NO: 25135 - DNA, 17 bp, synthetic construct
  misc_feature 1..17: note = Oligonucleotide
  source 1..17: mol_type = other DNA
gtggtgctgccttcgga

SEQ ID NO: 25136 - DNA, 17 bp, synthetic construct
  misc_feature 1..17: note = Oligonucleotide
  source 1..17: mol_type = other DNA
ggggtggtgctgccttc

SEQ ID NO: 25137 - DNA, 17 bp, synthetic construct
  misc_feature 1..17: note = Oligonucleotide
  source 1..17: mol_type = other DNA
cggggggtggtgctgcc

SEQ ID NO: 25138 - DNA, 17 bp, synthetic construct
  misc_feature 1..17: note = Oligonucleotide
  source 1..17: mol_type = other DNA
gggcggggggtggtgct

SEQ ID NO: 25139 - DNA, 17 bp, synthetic construct
  misc_feature 1..17: note = Oligonucleotide
  source 1..17: mol_type = other DNA
gctgggcggggggtggt

SEQ ID NO: 25140 - DNA, 17 bp, synthetic construct
  misc_feature 1..17: note = Oligonucleotide
  source 1..17: mol_type = other DNA
ggcgctgggcggggggt

SEQ ID NO: 25141 - DNA, 17 bp, synthetic construct
  misc_feature 1..17: note = Oligonucleotide
  source 1..17: mol_type = other DNA
cagggcgctgggcgggg

SEQ ID NO: 25142 - DNA, 17 bp, synthetic construct
  misc_feature 1..17: note = Oligonucleotide
  source 1..17: mol_type = other DNA
agccagggcgctgggcg

SEQ ID NO: 25143 - DNA, 17 bp, synthetic construct
  misc_feature 1..17: note = Oligonucleotide
  source 1..17: mol_type = other DNA
accagccagggcgctgg

SEQ ID NO: 25144 - DNA, 17 bp, synthetic construct
  misc_feature 1..17: note = Oligonucleotide
  source 1..17: mol_type = other DNA
gagaccagccagggcgc

SEQ ID NO: 25145 - DNA, 17 bp, synthetic construct
  misc_feature 1..17: note = Oligonucleotide
  source 1..17: mol_type = other DNA
ggtgagaccagccaggg

SEQ ID NO: 25146 - DNA, 17 bp, synthetic construct
  misc_feature 1..17: note = Oligonucleotide
  source 1..17: mol_type = other DNA
gccggtgagaccagcca

SEQ ID NO: 25147 - DNA, 17 bp, synthetic construct
  misc_feature 1..17: note = Oligonucleotide
  source 1..17: mol_type = other DNA
agggccggtgagaccag

SEQ ID NO: 25148 - DNA, 17 bp, synthetic construct
  misc_feature 1..17: note = Oligonucleotide
  source 1..17: mol_type = other DNA
ggaagggccggtgagac

SEQ ID NO: 25149 - DNA, 17 bp, synthetic construct
  misc_feature 1..17: note = Oligonucleotide
  source 1..17: mol_type = other DNA
gacggaagggccggtga

SEQ ID NO: 25150 - DNA, 17 bp, synthetic construct
  misc_feature 1..17: note = Oligonucleotide
  source 1..17: mol_type = other DNA
gcggacggaagggccgg

SEQ ID NO: 25151 - DNA, 17 bp, synthetic construct
  misc_feature 1..17: note = Oligonucleotide
  source 1..17: mol_type = other DNA
cctgcggacggaagggc

SEQ ID NO: 25152 - DNA, 17 bp, synthetic construct
  misc_feature 1..17: note = Oligonucleotide
  source 1..17: mol_type = other DNA
tcccctgcggacggaag

SEQ ID NO: 25153 - DNA, 17 bp, synthetic construct
  misc_feature 1..17: note = Oligonucleotide
  source 1..17: mol_type = other DNA
tcctcccctgcggacgg

SEQ ID NO: 25154 - DNA, 17 bp, synthetic construct
  misc_feature 1..17: note = Oligonucleotide
  source 1..17: mol_type = other DNA
tcgtcctcccctgcgga

SEQ ID NO: 25155 - DNA, 17 bp, synthetic construct
  misc_feature 1..17: note = Oligonucleotide
  source 1..17: mol_type = other DNA
ttctcgtcctcccctgc

SEQ ID NO: 25156 - DNA, 17 bp, synthetic construct
  misc_feature 1..17: note = Oligonucleotide
  source 1..17: mol_type = other DNA
agcttctcgtcctcccc

SEQ ID NO: 25157 - DNA, 17 bp, synthetic construct
  misc_feature 1..17: note = Oligonucleotide
  source 1..17: mol_type = other DNA
gccagcttctcgtcctc

SEQ ID NO: 25158 - DNA, 17 bp, synthetic construct
  misc_feature 1..17: note = Oligonucleotide
  source 1..17: mol_type = other DNA
gacgccagcttctcgtc

SEQ ID NO: 25159 - DNA, 17 bp, synthetic construct
  misc_feature 1..17: note = Oligonucleotide
  source 1..17: mol_type = other DNA
agggacgccagcttctc

SEQ ID NO: 25160 - DNA, 17 bp, synthetic construct
  misc_feature 1..17: note = Oligonucleotide
  source 1..17: mol_type = other DNA
agcagggacgccagctt

SEQ ID NO: 25161 - DNA, 17 bp, synthetic construct
  misc_feature 1..17: note = Oligonucleotide
  source 1..17: mol_type = other DNA
tccagcagggacgccag

SEQ ID NO: 25162 - DNA, 17 bp, synthetic construct
  misc_feature 1..17: note = Oligonucleotide
  source 1..17: mol_type = other DNA
ccttccagcagggacgc

SEQ ID NO: 25163 - DNA, 17 bp, synthetic construct
  misc_feature 1..17: note = Oligonucleotide
  source 1..17: mol_type = other DNA
cgcccttccagcaggga

SEQ ID NO: 25164 - DNA, 17 bp, synthetic construct
  misc_feature 1..17: note = Oligonucleotide
  source 1..17: mol_type = other DNA
aagcgcccttccagcag

SEQ ID NO: 25165 - DNA, 17 bp, synthetic construct
  misc_feature 1..17: note = Oligonucleotide
  source 1..17: mol_type = other DNA
gggaagcgcccttccag

SEQ ID NO: 25166 - DNA, 17 bp, synthetic construct
  misc_feature 1..17: note = Oligonucleotide
  source 1..17: mol_type = other DNA
cgcgggaagcgcccttc

SEQ ID NO: 25167 - DNA, 17 bp, synthetic construct
  misc_feature 1..17: note = Oligonucleotide
  source 1..17: mol_type = other DNA
ctccgcgggaagcgccc

SEQ ID NO: 25168 - DNA, 17 bp, synthetic construct
  misc_feature 1..17: note = Oligonucleotide
  source 1..17: mol_type = other DNA
gtgctccgcgggaagcg

SEQ ID NO: 25169 - DNA, 17 bp, synthetic construct
  misc_feature 1..17: note = Oligonucleotide
  source 1..17: mol_type = other DNA
gaggtgctccgcgggaa

SEQ ID NO: 25170 - DNA, 17 bp, synthetic construct
  misc_feature 1..17: note = Oligonucleotide
  source 1..17: mol_type = other DNA
atcgaggtgctccgcgg

SEQ ID NO: 25171 - DNA, 17 bp, synthetic construct
  misc_feature 1..17: note = Oligonucleotide
  source 1..17: mol_type = other DNA
tgcatcgaggtgctccg

SEQ ID NO: 25172 - DNA, 17 bp, synthetic construct
  misc_feature 1..17: note = Oligonucleotide
  source 1..17: mol_type = other DNA
tcttgcatcgaggtgct

SEQ ID NO: 25173 - DNA, 17 bp, synthetic construct
  misc_feature 1..17: note = Oligonucleotide
  source 1..17: mol_type = other DNA
gggtcttgcatcgaggt

SEQ ID NO: 25174 - DNA, 17 bp, synthetic construct
  misc_feature 1..17: note = Oligonucleotide
  source 1..17: mol_type = other DNA
accgggtcttgcatcga

SEQ ID NO: 25175 - DNA, 17 bp, synthetic construct
  misc_feature 1..17: note = Oligonucleotide
  source 1..17: mol_type = other DNA
cgcaccgggtcttgcat

SEQ ID NO: 25176 - DNA, 17 bp, synthetic construct
  misc_feature 1..17: note = Oligonucleotide
  source 1..17: mol_type = other DNA
tcgcgcaccgggtcttg

SEQ ID NO: 25177 - DNA, 17 bp, synthetic construct
  misc_feature 1..17: note = Oligonucleotide
  source 1..17: mol_type = other DNA
ccctcgcgcaccgggtc

SEQ ID NO: 25178 - DNA, 17 bp, synthetic construct
  misc_feature 1..17: note = Oligonucleotide
  source 1..17: mol_type = other DNA
cgaccctcgcgcaccgg

SEQ ID NO: 25179 - DNA, 17 bp, synthetic construct
  misc_feature 1..17: note = Oligonucleotide
  source 1..17: mol_type = other DNA
ccgcgaccctcgcgcac

SEQ ID NO: 25180 - DNA, 17 bp, synthetic construct
  misc_feature 1..17: note = Oligonucleotide
  source 1..17: mol_type = other DNA
atgccgcgaccctcgcg

SEQ ID NO: 25181 - DNA, 17 bp, synthetic construct
  misc_feature 1..17: note = Oligonucleotide
  source 1..17: mol_type = other DNA
gggatgccgcgaccctc

SEQ ID NO: 25182 - DNA, 17 bp, synthetic construct
  misc_feature 1..17: note = Oligonucleotide
  source 1..17: mol_type = other DNA
ggcgggatgccgcgacc

SEQ ID NO: 25183 - DNA, 17 bp, synthetic construct
  misc_feature 1..17: note = Oligonucleotide
  source 1..17: mol_type = other DNA
gggggcgggatgccgcg

SEQ ID NO: 25184 - DNA, 17 bp, synthetic construct
  misc_feature 1..17: note = Oligonucleotide
  source 1..17: mol_type = other DNA
ggcgggggcgggatgcc

SEQ ID NO: 25185 - DNA, 17 bp, synthetic construct
  misc_feature 1..17: note = Oligonucleotide
  source 1..17: mol_type = other DNA
tgcggcgggggcgggat

SEQ ID NO: 25186 - DNA, 17 bp, synthetic construct
  misc_feature 1..17: note = Oligonucleotide
  source 1..17: mol_type = other DNA
gtctgcggcgggggcgg

SEQ ID NO: 25187 - DNA, 17 bp, synthetic construct
  misc_feature 1..17: note = Oligonucleotide
  source 1..17: mol_type = other DNA
gcggtctgcggcggggg

SEQ ID NO: 25188 - DNA, 17 bp, synthetic construct
  misc_feature 1..17: note = Oligonucleotide
  source 1..17: mol_type = other DNA
ggcgcggtctgcggcgg

SEQ ID NO: 25189 - DNA, 17 bp, synthetic construct
  misc_feature 1..17: note = Oligonucleotide
  source 1..17: mol_type = other DNA
ggcggcgcggtctgcgg

SEQ ID NO: 25190 - DNA, 17 bp, synthetic construct
  misc_feature 1..17: note = Oligonucleotide
  source 1..17: mol_type = other DNA
ggaggcggcgcggtctg

SEQ ID NO: 25191 - DNA, 17 bp, synthetic construct
  misc_feature 1..17: note = Oligonucleotide
  source 1..17: mol_type = other DNA
gggggaggcggcgcggt

SEQ ID NO: 25192 - DNA, 17 bp, synthetic construct
  misc_feature 1..17: note = Oligonucleotide
  source 1..17: mol_type = other DNA
ggcgggggaggcggcgc

SEQ ID NO: 25193 - DNA, 17 bp, synthetic construct
  misc_feature 1..17: note = Oligonucleotide
  source 1..17: mol_type = other DNA
gcgggcgggggaggcgg

SEQ ID NO: 25194 - DNA, 17 bp, synthetic construct
  misc_feature 1..17: note = Oligonucleotide
  source 1..17: mol_type = other DNA
ggcgcgggcgggggagg

SEQ ID NO: 25195 - DNA, 17 bp, synthetic construct
  misc_feature 1..17: note = Oligonucleotide
  source 1..17: mol_type = other DNA
tagggcgcgggcggggg

SEQ ID NO: 25196 - DNA, 17 bp, synthetic construct
  misc_feature 1..17: note = Oligonucleotide
  source 1..17: mol_type = other DNA
tagtagggcgcgggcgg

SEQ ID NO: 25197 - DNA, 17 bp, synthetic construct
  misc_feature 1..17: note = Oligonucleotide
  source 1..17: mol_type = other DNA
aagtagtagggcgcggg

SEQ ID NO: 25198 - DNA, 17 bp, synthetic construct
  misc_feature 1..17: note = Oligonucleotide
  source 1..17: mol_type = other DNA
tcgaagtagtagggcgc

SEQ ID NO: 25199 - DNA, 17 bp, synthetic construct
  misc_feature 1..17: note = Oligonucleotide
  source 1..17: mol_type = other DNA
gagtcgaagtagtaggg

SEQ ID NO: 25200 - DNA, 17 bp, synthetic construct
  misc_feature 1..17: note = Oligonucleotide
  source 1..17: mol_type = other DNA
cccgagtcgaagtagta

SEQ ID NO: 25201 - DNA, 17 bp, synthetic construct
  misc_feature 1..17: note = Oligonucleotide
  source 1..17: mol_type = other DNA
ggccccgagtcgaagta

SEQ ID NO: 25202 - DNA, 17 bp, synthetic construct
  misc_feature 1..17: note = Oligonucleotide
  source 1..17: mol_type = other DNA
ggcggccccgagtcgaa

SEQ ID NO: 25203 - DNA, 17 bp, synthetic construct
  misc_feature 1..17: note = Oligonucleotide
  source 1..17: mol_type = other DNA
gggggcggccccgagtc

SEQ ID NO: 25204 - DNA, 17 bp, synthetic construct
  misc_feature 1..17: note = Oligonucleotide
  source 1..17: mol_type = other DNA
gccgggggcggccccga

SEQ ID NO: 25205 - DNA, 17 bp, synthetic construct
  misc_feature 1..17: note = Oligonucleotide
  source 1..17: mol_type = other DNA
aaggccgggggcggccc

SEQ ID NO: 25206 - DNA, 17 bp, synthetic construct
  misc_feature 1..17: note = Oligonucleotide
  source 1..17: mol_type = other DNA
gagaaggccgggggcgg

SEQ ID NO: 25207 - DNA, 17 bp, synthetic construct
  misc_feature 1..17: note = Oligonucleotide
  source 1..17: mol_type = other DNA
ggcgagaaggccggggg

SEQ ID NO: 25208 - DNA, 17 bp, synthetic construct
  misc_feature 1..17: note = Oligonucleotide
  source 1..17: mol_type = other DNA
ggcggcgagaaggccgg

SEQ ID NO: 25209 - DNA, 17 bp, synthetic construct
  misc_feature 1..17: note = Oligonucleotide
  source 1..17: mol_type = other DNA
ggcggcggcgagaaggc

SEQ ID NO: 25210 - DNA, 17 bp, synthetic construct
  misc_feature 1..17: note = Oligonucleotide
  source 1..17: mol_type = other DNA
gggggcggcggcgagaa

SEQ ID NO: 25211 - DNA, 17 bp, synthetic construct
  misc_feature 1..17: note = Oligonucleotide
  source 1..17: mol_type = other DNA
ggcgggggcggcggcga

SEQ ID NO: 25212 - DNA, 17 bp, synthetic construct
  misc_feature 1..17: note = Oligonucleotide
  source 1..17: mol_type = other DNA
cccggcgggggcggcgg

SEQ ID NO: 25213 - DNA, 17 bp, synthetic construct
  misc_feature 1..17: note = Oligonucleotide
  source 1..17: mol_type = other DNA
cggcccggcgggggcgg

SEQ ID NO: 25214 - DNA, 17 bp, synthetic construct
  misc_feature 1..17: note = Oligonucleotide
  source 1..17: mol_type = other DNA
gcgcggcccggcggggg

SEQ ID NO: 25215 - DNA, 17 bp, synthetic construct
  misc_feature 1..17: note = Oligonucleotide
  source 1..17: mol_type = other DNA
taggcgcggcccggcgg

SEQ ID NO: 25216 - DNA, 17 bp, synthetic construct
  misc_feature 1..17: note = Oligonucleotide
  source 1..17: mol_type = other DNA
tcgtaggcgcggcccgg

SEQ ID NO: 25217 - DNA, 17 bp, synthetic construct
  misc_feature 1..17: note = Oligonucleotide
  source 1..17: mol_type = other DNA
gtgtcgtaggcgcggcc

SEQ ID NO: 25218 - DNA, 17 bp, synthetic construct
  misc_feature 1..17: note = Oligonucleotide
  source 1..17: mol_type = other DNA
accgtgtcgtaggcgcg

SEQ ID NO: 25219 - DNA, 17 bp, synthetic construct
  misc_feature 1..17: note = Oligonucleotide
  source 1..17: mol_type = other DNA
cgcaccgtgtcgtaggc

SEQ ID NO: 25220 - DNA, 17 bp, synthetic construct
  misc_feature 1..17: note = Oligonucleotide
  source 1..17: mol_type = other DNA
gagcgcaccgtgtcgta

SEQ ID NO: 25221 - DNA, 17 bp, synthetic construct
  misc_feature 1..17: note = Oligonucleotide
  source 1..17: mol_type = other DNA
ctggagcgcaccgtgtc

SEQ ID NO: 25222 - DNA, 17 bp, synthetic construct
  misc_feature 1..17: note = Oligonucleotide
  source 1..17: mol_type = other DNA
aagctggagcgcaccgt

SEQ ID NO: 25223 - DNA, 17 bp, synthetic construct
  misc_feature 1..17: note = Oligonucleotide
  source 1..17: mol_type = other DNA
ttgaagctggagcgcac

SEQ ID NO: 25224 - DNA, 17 bp, synthetic construct
  misc_feature 1..17: note = Oligonucleotide
  source 1..17: mol_type = other DNA
ggcttgaagctggagcg

SEQ ID NO: 25225 - DNA, 17 bp, synthetic construct
  misc_feature 1..17: note = Oligonucleotide
  source 1..17: mol_type = other DNA
ccgggcttgaagctgga

SEQ ID NO: 25226 - DNA, 17 bp, synthetic construct
  misc_feature 1..17: note = Oligonucleotide
  source 1..17: mol_type = other DNA
aggccgggcttgaagct

SEQ ID NO: 25227 - DNA, 17 bp, synthetic construct
  misc_feature 1..17: note = Oligonucleotide
  source 1..17: mol_type = other DNA
tccaggccgggcttgaa

SEQ ID NO: 25228 - DNA, 17 bp, synthetic construct
  misc_feature 1..17: note = Oligonucleotide
  source 1..17: mol_type = other DNA
gcctccaggccgggctt

SEQ ID NO: 25229 - DNA, 17 bp, synthetic construct
  misc_feature 1..17: note = Oligonucleotide
  source 1..17: mol_type = other DNA
cgcgcctccaggccggg

SEQ ID NO: 25230 - DNA, 17 bp, synthetic construct
  misc_feature 1..17: note = Oligonucleotide
  source 1..17: mol_type = other DNA
aggcgcgcctccaggcc

SEQ ID NO: 25231 - DNA, 17 bp, synthetic construct
  misc_feature 1..17: note = Oligonucleotide
  source 1..17: mol_type = other DNA
cccaggcgcgcctccag

SEQ ID NO: 25232 - DNA, 17 bp, synthetic construct
  misc_feature 1..17: note = Oligonucleotide
  source 1..17: mol_type = other DNA
gcgcccaggcgcgcctc

SEQ ID NO: 25233 - DNA, 17 bp, synthetic construct
  misc_feature 1..17: note = Oligonucleotide
  source 1..17: mol_type = other DNA
cccgcgcccaggcgcgc

SEQ ID NO: 25234 - DNA, 17 bp, synthetic construct
  misc_feature 1..17: note = Oligonucleotide
  source 1..17: mol_type = other DNA
gcgcccgcgcccaggcg

SEQ ID NO: 25235 - DNA, 17 bp, synthetic construct
  misc_feature 1..17: note = Oligonucleotide
  source 1..17: mol_type = other DNA
gcagcgcccgcgcccag

SEQ ID NO: 25236 - DNA, 17 bp, synthetic construct
  misc_feature 1..17: note = Oligonucleotide
  source 1..17: mol_type = other DNA
ccggcagcgcccgcgcc

SEQ ID NO: 25237 - DNA, 17 bp, synthetic construct
  misc_feature 1..17: note = Oligonucleotide
  source 1..17: mol_type = other DNA
aggccggcagcgcccgc

SEQ ID NO: 25238 - DNA, 17 bp, synthetic construct
  misc_feature 1..17: note = Oligonucleotide
  source 1..17: mol_type = other DNA
tacaggccggcagcgcc

SEQ ID NO: 25239 - DNA, 17 bp, synthetic construct
  misc_feature 1..17: note = Oligonucleotide
  source 1..17: mol_type = other DNA
tcgtacaggccggcagc

SEQ ID NO: 25240 - DNA, 17 bp, synthetic construct
  misc_feature 1..17: note = Oligonucleotide
  source 1..17: mol_type = other DNA
ggctcgtacaggccggc

SEQ ID NO: 25241 - DNA, 17 bp, synthetic construct
  misc_feature 1..17: note = Oligonucleotide
  source 1..17: mol_type = other DNA
cccggctcgtacaggcc

SEQ ID NO: 25242 - DNA, 17 bp, synthetic construct
  misc_feature 1..17: note = Oligonucleotide
  source 1..17: mol_type = other DNA
gcgcccggctcgtacag

SEQ ID NO: 25243 - DNA, 17 bp, synthetic construct
  misc_feature 1..17: note = Oligonucleotide
  source 1..17: mol_type = other DNA
gccgcgcccggctcgta

SEQ ID NO: 25244 - DNA, 17 bp, synthetic construct
  misc_feature 1..17: note = Oligonucleotide
  source 1..17: mol_type = other DNA
agggccgcgcccggctc

SEQ ID NO: 25245 - DNA, 17 bp, synthetic construct
  misc_feature 1..17: note = Oligonucleotide
  source 1..17: mol_type = other DNA
ccgagggccgcgcccgg

SEQ ID NO: 25246 - DNA, 17 bp, synthetic construct
  misc_feature 1..17: note = Oligonucleotide
  source 1..17: mol_type = other DNA
gggccgagggccgcgcc

SEQ ID NO: 25247 - DNA, 17 bp, synthetic construct
  misc_feature 1..17: note = Oligonucleotide
  source 1..17: mol_type = other DNA
agcgggccgagggccgc

SEQ ID NO: 25248 - DNA, 17 bp, synthetic construct
  misc_feature 1..17: note = Oligonucleotide
  source 1..17: mol_type = other DNA
ggcagcgggccgagggc

SEQ ID NO: 25249 - DNA, 17 bp, synthetic construct
  misc_feature 1..17: note = Oligonucleotide
  source 1..17: mol_type = other DNA
tacggcagcgggccgag

SEQ ID NO: 25250 - DNA, 17 bp, synthetic construct
  misc_feature 1..17: note = Oligonucleotide
  source 1..17: mol_type = other DNA
ggatacggcagcgggcc

SEQ ID NO: 25251 - DNA, 17 bp, synthetic construct
  misc_feature 1..17: note = Oligonucleotide
  source 1..17: mol_type = other DNA
tcgggatacggcagcgg

SEQ ID NO: 25252 - DNA, 17 bp, synthetic construct
  misc_feature 1..17: note = Oligonucleotide
  source 1..17: mol_type = other DNA
cgctcgggatacggcag

SEQ ID NO: 25253 - DNA, 17 bp, synthetic construct
  misc_feature 1..17: note = Oligonucleotide
  source 1..17: mol_type = other DNA
tgccgctcgggatacgg

SEQ ID NO: 25254 - DNA, 17 bp, synthetic construct
  misc_feature 1..17: note = Oligonucleotide
  source 1..17: mol_type = other DNA
ttctgccgctcgggata

SEQ ID NO: 25255 - DNA, 17 bp, synthetic construct
  misc_feature 1..17: note = Oligonucleotide
  source 1..17: mol_type = other DNA
cgcttctgccgctcggg

SEQ ID NO: 25256 - DNA, 17 bp, synthetic construct
  misc_feature 1..17: note = Oligonucleotide
  source 1..17: mol_type = other DNA
gcgcgcttctgccgctc

SEQ ID NO: 25257 - DNA, 17 bp, synthetic construct
  misc_feature 1..17: note = Oligonucleotide
  source 1..17: mol_type = other DNA
cgcgcgcgcttctgccg

SEQ ID NO: 25258 - DNA, 17 bp, synthetic construct
  misc_feature 1..17: note = Oligonucleotide
  source 1..17: mol_type = other DNA
gagcgcgcgcgcttctg

SEQ ID NO: 25259 - DNA, 17 bp, synthetic construct
  misc_feature 1..17: note = Oligonucleotide
  source 1..17: mol_type = other DNA
atggagcgcgcgcgctt

SEQ ID NO: 25260 - DNA, 17 bp, synthetic construct
  misc_feature 1..17: note = Oligonucleotide
  source 1..17: mol_type = other DNA
atcatggagcgcgcgcg

SEQ ID NO: 25261 - DNA, 17 bp, synthetic construct
  misc_feature 1..17: note = Oligonucleotide
  source 1..17: mol_type = other DNA
atgatcatggagcgcgc

SEQ ID NO: 25262 - DNA, 17 bp, synthetic construct
  misc_feature 1..17: note = Oligonucleotide
  source 1..17: mol_type = other DNA
aggatgatcatggagcg

SEQ ID NO: 25263 - DNA, 17 bp, synthetic construct
  misc_feature 1..17: note = Oligonucleotide
  source 1..17: mol_type = other DNA
tgcaggatgatcatgga

SEQ ID NO: 25264 - DNA, 17 bp, synthetic construct
  misc_feature 1..17: note = Oligonucleotide
  source 1..17: mol_type = other DNA
tcctgcaggatgatcat

SEQ ID NO: 25265 - DNA, 17 bp, synthetic construct
  misc_feature 1..17: note = Oligonucleotide
  source 1..17: mol_type = other DNA
gagtcctgcaggatgat

SEQ ID NO: 25266 - DNA, 17 bp, synthetic construct
  misc_feature 1..17: note = Oligonucleotide
  source 1..17: mol_type = other DNA
gccgagtcctgcaggat

SEQ ID NO: 25267 - DNA, 17 bp, synthetic construct
  misc_feature 1..17: note = Oligonucleotide
  source 1..17: mol_type = other DNA
ggcgccgagtcctgcag

SEQ ID NO: 25268 - DNA, 17 bp, synthetic construct
  misc_feature 1..17: note = Oligonucleotide
  source 1..17: mol_type = other DNA
tcgggcgccgagtcctg

SEQ ID NO: 25269 - DNA, 17 bp, synthetic construct
  misc_feature 1..17: note = Oligonucleotide
  source 1..17: mol_type = other DNA
gactcgggcgccgagtc

SEQ ID NO: 25270 - DNA, 17 bp, synthetic construct
  misc_feature 1..17: note = Oligonucleotide
  source 1..17: mol_type = other DNA
cccgactcgggcgccga

SEQ ID NO: 25271 - DNA, 17 bp, synthetic construct
  misc_feature 1..17: note = Oligonucleotide
  source 1..17: mol_type = other DNA
tcgcccgactcgggcgc

SEQ ID NO: 25272 - DNA, 17 bp, synthetic construct
  misc_feature 1..17: note = Oligonucleotide
  source 1..17: mol_type = other DNA
gcgtcgcccgactcggg

SEQ ID NO: 25273 - DNA, 17 bp, synthetic construct
  misc_feature 1..17: note = Oligonucleotide
  source 1..17: mol_type = other DNA
ggggcgtcgcccgactc

SEQ ID NO: 25274 - DNA, 17 bp, synthetic construct
  misc_feature 1..17: note = Oligonucleotide
  source 1..17: mol_type = other DNA
cgaggggcgtcgcccga

SEQ ID NO: 25275 - DNA, 17 bp, synthetic construct
  misc_feature 1..17: note = Oligonucleotide
  source 1..17: mol_type = other DNA
ggtcgaggggcgtcgcc

SEQ ID NO: 25276 - DNA, 17 bp, synthetic construct
  misc_feature 1..17: note = Oligonucleotide
  source 1..17: mol_type = other DNA
gggggtcgaggggcgtc

SEQ ID NO: 25277 - DNA, 17 bp, synthetic construct
  misc_feature 1..17: note = Oligonucleotide
  source 1..17: mol_type = other DNA
ggcgggggtcgaggggc

SEQ ID NO: 25278 - DNA, 17 bp, synthetic construct
  misc_feature 1..17: note = Oligonucleotide
  source 1..17: mol_type = other DNA
gcgggcgggggtcgagg

SEQ ID NO: 25279 - DNA, 17 bp, synthetic construct
  misc_feature 1..17: note = Oligonucleotide
  source 1..17: mol_type = other DNA
gccgcgggcgggggtcg

SEQ ID NO: 25280 - DNA, 17 bp, synthetic construct
  misc_feature 1..17: note = Oligonucleotide
  source 1..17: mol_type = other DNA
gtggccgcgggcggggg

SEQ ID NO: 25281 - DNA, 17 bp, synthetic construct
  misc_feature 1..17: note = Oligonucleotide
  source 1..17: mol_type = other DNA
ggggtggccgcgggcgg

SEQ ID NO: 25282 - DNA, 17 bp, synthetic construct
  misc_feature 1..17: note = Oligonucleotide
  source 1..17: mol_type = other DNA
ggcggggtggccgcggg

SEQ ID NO: 25283 - DNA, 17 bp, synthetic construct
  misc_feature 1..17: note = Oligonucleotide
  source 1..17: mol_type = other DNA
tcgggcggggtggccgc

SEQ ID NO: 25284 - DNA, 17 bp, synthetic construct
  misc_feature 1..17: note = Oligonucleotide
  source 1..17: mol_type = other DNA
cgctcgggcggggtggc

SEQ ID NO: 25285 - DNA, 17 bp, synthetic construct
  misc_feature 1..17: note = Oligonucleotide
  source 1..17: mol_type = other DNA
ggtcgctcgggcggggt

SEQ ID NO: 25286 - DNA, 17 bp, synthetic construct
  misc_feature 1..17: note = Oligonucleotide
  source 1..17: mol_type = other DNA
ttgggtcgctcgggcgg

SEQ ID NO: 25287 - DNA, 17 bp, synthetic construct
  misc_feature 1..17: note = Oligonucleotide
  source 1..17: mol_type = other DNA
cgcttgggtcgctcggg

SEQ ID NO: 25288 - DNA, 17 bp, synthetic construct
  misc_feature 1..17: note = Oligonucleotide
  source 1..17: mol_type = other DNA
cggcgcttgggtcgctc

SEQ ID NO: 25289 - DNA, 17 bp, synthetic construct
  misc_feature 1..17: note = Oligonucleotide
  source 1..17: mol_type = other DNA
ggccggcgcttgggtcg

SEQ ID NO: 25290 - DNA, 17 bp, synthetic construct
  misc_feature 1..17: note = Oligonucleotide
  source 1..17: mol_type = other DNA
cgcggccggcgcttggg

SEQ ID NO: 25291 - DNA, 17 bp, synthetic construct
  misc_feature 1..17: note = Oligonucleotide
  source 1..17: mol_type = other DNA
ggccgcggccggcgctt

SEQ ID NO: 25292 - DNA, 17 bp, synthetic construct
  misc_feature 1..17: note = Oligonucleotide
  source 1..17: mol_type = other DNA
ggcggccgcggccggcg

SEQ ID NO: 25293 - DNA, 17 bp, synthetic construct
  misc_feature 1..17: note = Oligonucleotide
  source 1..17: mol_type = other DNA
ccgggcggccgcggccg

SEQ ID NO: 25294 - DNA, 17 bp, synthetic construct
  misc_feature 1..17: note = Oligonucleotide
  source 1..17: mol_type = other DNA
gggccgggcggccgcgg

SEQ ID NO: 25295 - DNA, 17 bp, synthetic construct
  misc_feature 1..17: note = Oligonucleotide
  source 1..17: mol_type = other DNA
tcggggccgggcggccg

SEQ ID NO: 25296 - DNA, 17 bp, synthetic construct
  misc_feature 1..17: note = Oligonucleotide
  source 1..17: mol_type = other DNA
ctgtcggggccgggcgg

SEQ ID NO: 25297 - DNA, 17 bp, synthetic construct
  misc_feature 1..17: note = Oligonucleotide
  source 1..17: mol_type = other DNA
gggctgtcggggccggg

SEQ ID NO: 25298 - DNA, 17 bp, synthetic construct
  misc_feature 1..17: note = Oligonucleotide
  source 1..17: mol_type = other DNA
taggggctgtcggggcc

SEQ ID NO: 25299 - DNA, 17 bp, synthetic construct
  misc_feature 1..17: note = Oligonucleotide
  source 1..17: mol_type = other DNA
gcgtaggggctgtcggg

SEQ ID NO: 25300 - DNA, 17 bp, synthetic construct
  misc_feature 1..17: note = Oligonucleotide
  source 1..17: mol_type = other DNA
ttggcgtaggggctgtc

SEQ ID NO: 25301 - DNA, 17 bp, synthetic construct
  misc_feature 1..17: note = Oligonucleotide
  source 1..17: mol_type = other DNA
aggttggcgtaggggct

SEQ ID NO: 25302 - DNA, 17 bp, synthetic construct
  misc_feature 1..17: note = Oligonucleotide
  source 1..17: mol_type = other DNA
cccaggttggcgtaggg

SEQ ID NO: 25303 - DNA, 17 bp, synthetic construct
  misc_feature 1..17: note = Oligonucleotide
  source 1..17: mol_type = other DNA
gcgcccaggttggcgta

SEQ ID NO: 25304 - DNA, 17 bp, synthetic construct
  misc_feature 1..17: note = Oligonucleotide
  source 1..17: mol_type = other DNA
aaggcgcccaggttggc

SEQ ID NO: 25305 - DNA, 17 bp, synthetic construct
  misc_feature 1..17: note = Oligonucleotide
  source 1..17: mol_type = other DNA
ctgaaggcgcccaggtt

SEQ ID NO: 25306 - DNA, 17 bp, synthetic construct
  misc_feature 1..17: note = Oligonucleotide
  source 1..17: mol_type = other DNA
gcgctgaaggcgcccag

SEQ ID NO: 25307 - DNA, 17 bp, synthetic construct
  misc_feature 1..17: note = Oligonucleotide
  source 1..17: mol_type = other DNA
ctggcgctgaaggcgcc

SEQ ID NO: 25308 - DNA, 17 bp, synthetic construct
  misc_feature 1..17: note = Oligonucleotide
  source 1..17: mol_type = other DNA
aggctggcgctgaaggc

SEQ ID NO: 25309 - DNA, 17 bp, synthetic construct
  misc_feature 1..17: note = Oligonucleotide
  source 1..17: mol_type = other DNA
aagaggctggcgctgaa

SEQ ID NO: 25310 - DNA, 17 bp, synthetic construct
  misc_feature 1..17: note = Oligonucleotide
  source 1..17: mol_type = other DNA
gcgaagaggctggcgct

SEQ ID NO: 25311 - DNA, 17 bp, synthetic construct
  misc_feature 1..17: note = Oligonucleotide
  source 1..17: mol_type = other DNA
ggagcgaagaggctggc

SEQ ID NO: 25312 - DNA, 17 bp, synthetic construct
  misc_feature 1..17: note = Oligonucleotide
  source 1..17: mol_type = other DNA
gacggagcgaagaggct

SEQ ID NO: 25313 - DNA, 17 bp, synthetic construct
  misc_feature 1..17: note = Oligonucleotide
  source 1..17: mol_type = other DNA
ttggacggagcgaagag

SEQ ID NO: 25314 - DNA, 17 bp, synthetic construct
  misc_feature 1..17: note = Oligonucleotide
  source 1..17: mol_type = other DNA
ggcttggacggagcgaa

SEQ ID NO: 25315 - DNA, 17 bp, synthetic construct
  misc_feature 1..17: note = Oligonucleotide
  source 1..17: mol_type = other DNA
tgcggcttggacggagc

SEQ ID NO: 25316 - DNA, 17 bp, synthetic construct
  misc_feature 1..17: note = Oligonucleotide
  source 1..17: mol_type = other DNA
cgctgcggcttggacgg

SEQ ID NO: 25317 - DNA, 17 bp, synthetic construct
  misc_feature 1..17: note = Oligonucleotide
  source 1..17: mol_type = other DNA
cggcgctgcggcttgga

SEQ ID NO: 25318 - DNA, 17 bp, synthetic construct
  misc_feature 1..17: note = Oligonucleotide
  source 1..17: mol_type = other DNA
ttgcggcgctgcggctt

SEQ ID NO: 25319 - DNA, 17 bp, synthetic construct
  misc_feature 1..17: note = Oligonucleotide
  source 1..17: mol_type = other DNA
ctcttgcggcgctgcgg

SEQ ID NO: 25320 - DNA, 17 bp, synthetic construct
  misc_feature 1..17: note = Oligonucleotide
  source 1..17: mol_type = other DNA
gggctcttgcggcgctg

SEQ ID NO: 25321 - DNA, 17 bp, synthetic construct
  misc_feature 1..17: note = Oligonucleotide
  source 1..17: mol_type = other DNA
agggggctcttgcggcg

SEQ ID NO: 25322 - DNA, 17 bp, synthetic construct
  misc_feature 1..17: note = Oligonucleotide
  source 1..17: mol_type = other DNA
accagggggctcttgcg

SEQ ID NO: 25323 - DNA, 17 bp, synthetic construct
  misc_feature 1..17: note = Oligonucleotide
  source 1..17: mol_type = other DNA
ttcaccagggggctctt

SEQ ID NO: 25324 - DNA, 17 bp, synthetic construct
  misc_feature 1..17: note = Oligonucleotide
  source 1..17: mol_type = other DNA
tgcttcaccagggggct

SEQ ID NO: 25325 - DNA, 17 bp, synthetic construct
  misc_feature 1..17: note = Oligonucleotide
  source 1..17: mol_type = other DNA
agctgcttcaccagggg

SEQ ID NO: 25326 - DNA, 17 bp, synthetic construct
  misc_feature 1..17: note = Oligonucleotide
  source 1..17: mol_type = other DNA
tgcagctgcttcaccag

SEQ ID NO: 25327 - DNA, 17 bp, synthetic construct
  misc_feature 1..17: note = Oligonucleotide
  source 1..17: mol_type = other DNA
acctgcagctgcttcac

SEQ ID NO: 25328 - DNA, 17 bp, synthetic construct
  misc_feature 1..17: note = Oligonucleotide
  source 1..17: mol_type = other DNA
tccacctgcagctgctt

SEQ ID NO: 25329 - DNA, 17 bp, synthetic construct
  misc_feature 1..17: note = Oligonucleotide
  source 1..17: mol_type = other DNA
tcctccacctgcagctg

SEQ ID NO: 25330 - DNA, 17 bp, synthetic construct
  misc_feature 1..17: note = Oligonucleotide
  source 1..17: mol_type = other DNA
gcgtcctccacctgcag

SEQ ID NO: 25331 - DNA, 17 bp, synthetic construct
  misc_feature 1..17: note = Oligonucleotide
  source 1..17: mol_type = other DNA
tgcgcgtcctccacctg

SEQ ID NO: 25332 - DNA, 17 bp, synthetic construct
  misc_feature 1..17: note = Oligonucleotide
  source 1..17: mol_type = other DNA
tcctgcgcgtcctccac

SEQ ID NO: 25333 - DNA, 17 bp, synthetic construct
  misc_feature 1..17: note = Oligonucleotide
  source 1..17: mol_type = other DNA
cgctcctgcgcgtcctc

SEQ ID NO: 25334 - DNA, 17 bp, synthetic construct
  misc_feature 1..17: note = Oligonucleotide
  source 1..17: mol_type = other DNA
gcgcgctcctgcgcgtc

SEQ ID NO: 25335 - DNA, 17 bp, synthetic construct
  misc_feature 1..17: note = Oligonucleotide
  source 1..17: mol_type = other DNA
gccgcgcgctcctgcgc

SEQ ID NO: 25336 - DNA, 17 bp, synthetic construct
  misc_feature 1..17: note = Oligonucleotide
  source 1..17: mol_type = other DNA
agggccgcgcgctcctg

SEQ ID NO: 25337 - DNA, 17 bp, synthetic construct
  misc_feature 1..17: note = Oligonucleotide
  source 1..17: mol_type = other DNA
gccagggccgcgcgctc

SEQ ID NO: 25338 - DNA, 17 bp, synthetic construct
  misc_feature 1..17: note = Oligonucleotide
  source 1..17: mol_type = other DNA
acggccagggccgcgcg

SEQ ID NO: 25339 - DNA, 17 bp, synthetic construct
  misc_feature 1..17: note = Oligonucleotide
  source 1..17: mol_type = other DNA
cccacggccagggccgc

SEQ ID NO: 25340 - DNA, 17 bp, synthetic construct
  misc_feature 1..17: note = Oligonucleotide
  source 1..17: mol_type = other DNA
ctgcccacggccagggc

SEQ ID NO: 25341 - DNA, 17 bp, synthetic construct
  misc_feature 1..17: note = Oligonucleotide
  source 1..17: mol_type = other DNA
gggctgcccacggccag

SEQ ID NO: 25342 - DNA, 17 bp, synthetic construct
  misc_feature 1..17: note = Oligonucleotide
  source 1..17: mol_type = other DNA
ccggggctgcccacggc

SEQ ID NO: 25343 - DNA, 17 bp, synthetic construct
  misc_feature 1..17: note = Oligonucleotide
  source 1..17: mol_type = other DNA
ggaccggggctgcccac

SEQ ID NO: 25344 - DNA, 17 bp, synthetic construct
  misc_feature 1..17: note = Oligonucleotide
  source 1..17: mol_type = other DNA
ccgggaccggggctgcc

SEQ ID NO: 25345 - DNA, 17 bp, synthetic construct
  misc_feature 1..17: note = Oligonucleotide
  source 1..17: mol_type = other DNA
ccgccgggaccggggct

SEQ ID NO: 25346 - DNA, 17 bp, synthetic construct
  misc_feature 1..17: note = Oligonucleotide
  source 1..17: mol_type = other DNA
ccgccgccgggaccggg

SEQ ID NO: 25347 - DNA, 17 bp, synthetic construct
  misc_feature 1..17: note = Oligonucleotide
  source 1..17: mol_type = other DNA
ctgccgccgccgggacc

SEQ ID NO: 25348 - DNA, 17 bp, synthetic construct
  misc_feature 1..17: note = Oligonucleotide
  source 1..17: mol_type = other DNA
aagctgccgccgccggg

SEQ ID NO: 25349 - DNA, 17 bp, synthetic construct
  misc_feature 1..17: note = Oligonucleotide
  source 1..17: mol_type = other DNA
gcgaagctgccgccgcc

SEQ ID NO: 25350 - DNA, 17 bp, synthetic construct
  misc_feature 1..17: note = Oligonucleotide
  source 1..17: mol_type = other DNA
cgggcgaagctgccgcc

SEQ ID NO: 25351 - DNA, 17 bp, synthetic construct
  misc_feature 1..17: note = Oligonucleotide
  source 1..17: mol_type = other DNA
tcgcgggcgaagctgcc

SEQ ID NO: 25352 - DNA, 17 bp, synthetic construct
  misc_feature 1..17: note = Oligonucleotide
  source 1..17: mol_type = other DNA
ggctcgcgggcgaagct

SEQ ID NO: 25353 - DNA, 17 bp, synthetic construct
  misc_feature 1..17: note = Oligonucleotide
  source 1..17: mol_type = other DNA
gagggctcgcgggcgaa

SEQ ID NO: 25354 - DNA, 17 bp, synthetic construct
  misc_feature 1..17: note = Oligonucleotide
  source 1..17: mol_type = other DNA
ggggagggctcgcgggc

SEQ ID NO: 25355 - DNA, 17 bp, synthetic construct
  misc_feature 1..17: note = Oligonucleotide
  source 1..17: mol_type = other DNA
gtcggggagggctcgcg

SEQ ID NO: 25356 - DNA, 17 bp, synthetic construct
  misc_feature 1..17: note = Oligonucleotide
  source 1..17: mol_type = other DNA
tgggtcggggagggctc

SEQ ID NO: 25357 - DNA, 17 bp, synthetic construct
  misc_feature 1..17: note = Oligonucleotide
  source 1..17: mol_type = other DNA
cggtgggtcggggaggg

SEQ ID NO: 25358 - DNA, 17 bp, synthetic construct
  misc_feature 1..17: note = Oligonucleotide
  source 1..17: mol_type = other DNA
ccgcggtgggtcgggga

SEQ ID NO: 25359 - DNA, 17 bp, synthetic construct
  misc_feature 1..17: note = Oligonucleotide
  source 1..17: mol_type = other DNA
ggaccgcggtgggtcgg

SEQ ID NO: 25360 - DNA, 17 bp, synthetic construct
  misc_feature 1..17: note = Oligonucleotide
  source 1..17: mol_type = other DNA
cgcggaccgcggtgggt

SEQ ID NO: 25361 - DNA, 17 bp, synthetic construct
  misc_feature 1..17: note = Oligonucleotide
  source 1..17: mol_type = other DNA
gggcgcggaccgcggtg

SEQ ID NO: 25362 - DNA, 17 bp, synthetic construct
  misc_feature 1..17: note = Oligonucleotide
  source 1..17: mol_type = other DNA
cccgggcgcggaccgcg

SEQ ID NO: 25363 - DNA, 17 bp, synthetic construct
  misc_feature 1..17: note = Oligonucleotide
  source 1..17: mol_type = other DNA
ccacccgggcgcggacc

SEQ ID NO: 25364 - DNA, 17 bp, synthetic construct
  misc_feature 1..17: note = Oligonucleotide
  source 1..17: mol_type = other DNA
aggccacccgggcgcgg

SEQ ID NO: 25365 - DNA, 17 bp, synthetic construct
  misc_feature 1..17: note = Oligonucleotide
  source 1..17: mol_type = other DNA
tcgaggccacccgggcg

SEQ ID NO: 25366 - DNA, 17 bp, synthetic construct
  misc_feature 1..17: note = Oligonucleotide
  source 1..17: mol_type = other DNA
tagtcgaggccacccgg

SEQ ID NO: 25367 - DNA, 17 bp, synthetic construct
  misc_feature 1..17: note = Oligonucleotide
  source 1..17: mol_type = other DNA
ccgtagtcgaggccacc

SEQ ID NO: 25368 - DNA, 17 bp, synthetic construct
  misc_feature 1..17: note = Oligonucleotide
  source 1..17: mol_type = other DNA
gcgccgtagtcgaggcc

SEQ ID NO: 25369 - DNA, 17 bp, synthetic construct
  misc_feature 1..17: note = Oligonucleotide
  source 1..17: mol_type = other DNA
cccgcgccgtagtcgag

SEQ ID NO: 25370 - DNA, 17 bp, synthetic construct
  misc_feature 1..17: note = Oligonucleotide
  source 1..17: mol_type = other DNA
tcgcccgcgccgtagtc

SEQ ID NO: 25371 - DNA, 17 bp, synthetic construct
  misc_feature 1..17: note = Oligonucleotide
  source 1..17: mol_type = other DNA
ccatcgcccgcgccgta

SEQ ID NO: 25372 - DNA, 17 bp, synthetic construct
  misc_feature 1..17: note = Oligonucleotide
  source 1..17: mol_type = other DNA
gggccatcgcccgcgcc

SEQ ID NO: 25373 - DNA, 17 bp, synthetic construct
  misc_feature 1..17: note = Oligonucleotide
  source 1..17: mol_type = other DNA
cccgggccatcgcccgc

SEQ ID NO: 25374 - DNA, 17 bp, synthetic construct
  misc_feature 1..17: note = Oligonucleotide
  source 1..17: mol_type = other DNA
agccccgggccatcgcc

SEQ ID NO: 25375 - DNA, 17 bp, synthetic construct
  misc_feature 1..17: note = Oligonucleotide
  source 1..17: mol_type = other DNA
gcgagccccgggccatc

SEQ ID NO: 25376 - DNA, 17 bp, synthetic construct
  misc_feature 1..17: note = Oligonucleotide
  source 1..17: mol_type = other DNA
aacgcgagccccgggcc

SEQ ID NO: 25377 - DNA, 17 bp, synthetic construct
  misc_feature 1..17: note = Oligonucleotide
  source 1..17: mol_type = other DNA
ccgaacgcgagccccgg

SEQ ID NO: 25378 - DNA, 17 bp, synthetic construct
  misc_feature 1..17: note = Oligonucleotide
  source 1..17: mol_type = other DNA
ccgccgaacgcgagccc

SEQ ID NO: 25379 - DNA, 17 bp, synthetic construct
  misc_feature 1..17: note = Oligonucleotide
  source 1..17: mol_type = other DNA
gggccgccgaacgcgag

SEQ ID NO: 25380 - DNA, 17 bp, synthetic construct
  misc_feature 1..17: note = Oligonucleotide
  source 1..17: mol_type = other DNA
cccgggccgccgaacgc

SEQ ID NO: 25381 - DNA, 17 bp, synthetic construct
  misc_feature 1..17: note = Oligonucleotide
  source 1..17: mol_type = other DNA
gggcccgggccgccgaa

SEQ ID NO: 25382 - DNA, 17 bp, synthetic construct
  misc_feature 1..17: note = Oligonucleotide
  source 1..17: mol_type = other DNA
gccgggcccgggccgcc

SEQ ID NO: 25383 - DNA, 17 bp, synthetic construct
  misc_feature 1..17: note = Oligonucleotide
  source 1..17: mol_type = other DNA
ttggccgggcccgggcc

SEQ ID NO: 25384 - DNA, 17 bp, synthetic construct
  misc_feature 1..17: note = Oligonucleotide
  source 1..17: mol_type = other DNA
tccttggccgggcccgg

SEQ ID NO: 25385 - DNA, 17 bp, synthetic construct
  misc_feature 1..17: note = Oligonucleotide
  source 1..17: mol_type = other DNA
cggtccttggccgggcc

SEQ ID NO: 25386 - DNA, 17 bp, synthetic construct
  misc_feature 1..17: note = Oligonucleotide
  source 1..17: mol_type = other DNA
cgccggtccttggccgg

SEQ ID NO: 25387 - DNA, 17 bp, synthetic construct
  misc_feature 1..17: note = Oligonucleotide
  source 1..17: mol_type = other DNA
agccgccggtccttggc

SEQ ID NO: 25388 - DNA, 17 bp, synthetic construct
  misc_feature 1..17: note = Oligonucleotide
  source 1..17: mol_type = other DNA
tccagccgccggtcctt

SEQ ID NO: 25389 - DNA, 17 bp, synthetic construct
  misc_feature 1..17: note = Oligonucleotide
  source 1..17: mol_type = other DNA
tcctccagccgccggtc

SEQ ID NO: 25390 - DNA, 17 bp, synthetic construct
  misc_feature 1..17: note = Oligonucleotide
  source 1..17: mol_type = other DNA
cgctcctccagccgccg

SEQ ID NO: 25391 - DNA, 17 bp, synthetic construct
  misc_feature 1..17: note = Oligonucleotide
  source 1..17: mol_type = other DNA
cgccgctcctccagccg

SEQ ID NO: 25392 - DNA, 17 bp, synthetic construct
  misc_feature 1..17: note = Oligonucleotide
  source 1..17: mol_type = other DNA
cggcgccgctcctccag

SEQ ID NO: 25393 - DNA, 17 bp, synthetic construct
  misc_feature 1..17: note = Oligonucleotide
  source 1..17: mol_type = other DNA
gagcggcgccgctcctc

SEQ ID NO: 25394 - DNA, 17 bp, synthetic construct
  misc_feature 1..17: note = Oligonucleotide
  source 1..17: mol_type = other DNA
gtggagcggcgccgctc

SEQ ID NO: 25395 - DNA, 17 bp, synthetic construct
  misc_feature 1..17: note = Oligonucleotide
  source 1..17: mol_type = other DNA
acagtggagcggcgccg

SEQ ID NO: 25396 - DNA, 17 bp, synthetic construct
  misc_feature 1..17: note = Oligonucleotide
  source 1..17: mol_type = other DNA
aacacagtggagcggcg

SEQ ID NO: 25397 - DNA, 17 bp, synthetic construct
  misc_feature 1..17: note = Oligonucleotide
  source 1..17: mol_type = other DNA
aggaacacagtggagcg

SEQ ID NO: 25398 - DNA, 17 bp, synthetic construct
  misc_feature 1..17: note = Oligonucleotide
  source 1..17: mol_type = other DNA
gacaggaacacagtgga

SEQ ID NO: 25399 - DNA, 17 bp, synthetic construct
  misc_feature 1..17: note = Oligonucleotide
  source 1..17: mol_type = other DNA
acggacaggaacacagt

SEQ ID NO: 25400 - DNA, 17 bp, synthetic construct
  misc_feature 1..17: note = Oligonucleotide
  source 1..17: mol_type = other DNA
cccacggacaggaacac

SEQ ID NO: 25401 - DNA, 17 bp, synthetic construct
  misc_feature 1..17: note = Oligonucleotide
  source 1..17: mol_type = other DNA
gcccccacggacaggaa

SEQ ID NO: 25402 - DNA, 17 bp, synthetic construct
  misc_feature 1..17: note = Oligonucleotide
  source 1..17: mol_type = other DNA
atggcccccacggacag

SEQ ID NO: 25403 - DNA, 17 bp, synthetic construct
  misc_feature 1..17: note = Oligonucleotide
  source 1..17: mol_type = other DNA
tcgatggcccccacgga

SEQ ID NO: 25404 - DNA, 17 bp, synthetic construct
  misc_feature 1..17: note = Oligonucleotide
  source 1..17: mol_type = other DNA
ccctcgatggcccccac

SEQ ID NO: 25405 - DNA, 17 bp, synthetic construct
  misc_feature 1..17: note = Oligonucleotide
  source 1..17: mol_type = other DNA
ctgccctcgatggcccc

SEQ ID NO: 25406 - DNA, 17 bp, synthetic construct
  misc_feature 1..17: note = Oligonucleotide
  source 1..17: mol_type = other DNA
gcgctgccctcgatggc

SEQ ID NO: 25407 - DNA, 17 bp, synthetic construct
  misc_feature 1..17: note = Oligonucleotide
  source 1..17: mol_type = other DNA
ggggcgctgccctcgat

SEQ ID NO: 25408 - DNA, 17 bp, synthetic construct
  misc_feature 1..17: note = Oligonucleotide
  source 1..17: mol_type = other DNA
ccgggggcgctgccctc

SEQ ID NO: 25409 - DNA, 17 bp, synthetic construct
  misc_feature 1..17: note = Oligonucleotide
  source 1..17: mol_type = other DNA
gcgccgggggcgctgcc

SEQ ID NO: 25410 - DNA, 17 bp, synthetic construct
  misc_feature 1..17: note = Oligonucleotide
  source 1..17: mol_type = other DNA
tccgcgccgggggcgct

SEQ ID NO: 25411 - DNA, 17 bp, synthetic construct
  misc_feature 1..17: note = Oligonucleotide
  source 1..17: mol_type = other DNA
agatccgcgccgggggc

SEQ ID NO: 25412 - DNA, 17 bp, synthetic construct
  misc_feature 1..17: note = Oligonucleotide
  source 1..17: mol_type = other DNA
ggcagatccgcgccggg

SEQ ID NO: 25413 - DNA, 17 bp, synthetic construct
  misc_feature 1..17: note = Oligonucleotide
  source 1..17: mol_type = other DNA
gatggcagatccgcgcc

SEQ ID NO: 25414 - DNA, 17 bp, synthetic construct
  misc_feature 1..17: note = Oligonucleotide
  source 1..17: mol_type = other DNA
agggatggcagatccgc

SEQ ID NO: 25415 - DNA, 17 bp, synthetic construct
  misc_feature 1..17: note = Oligonucleotide
  source 1..17: mol_type = other DNA
tgtagggatggcagatc

SEQ ID NO: 25416 - DNA, 17 bp, synthetic construct
  misc_feature 1..17: note = Oligonucleotide
  source 1..17: mol_type = other DNA
ggctgtagggatggcag

SEQ ID NO: 25417 - DNA, 17 bp, synthetic construct
  misc_feature 1..17: note = Oligonucleotide
  source 1..17: mol_type = other DNA
gagggctgtagggatgg

SEQ ID NO: 25418 - DNA, 17 bp, synthetic construct
  misc_feature 1..17: note = Oligonucleotide
  source 1..17: mol_type = other DNA
cgggagggctgtaggga

SEQ ID NO: 25419 - DNA, 17 bp, synthetic construct
  misc_feature 1..17: note = Oligonucleotide
  source 1..17: mol_type = other DNA
gagcgggagggctgtag

SEQ ID NO: 25420 - DNA, 17 bp, synthetic construct
  misc_feature 1..17: note = Oligonucleotide
  source 1..17: mol_type = other DNA
atggagcgggagggctg

SEQ ID NO: 25421 - DNA, 17 bp, synthetic construct
  misc_feature 1..17: note = Oligonucleotide
  source 1..17: mol_type = other DNA
tcgatggagcgggaggg

SEQ ID NO: 25422 - DNA, 17 bp, synthetic construct
  misc_feature 1..17: note = Oligonucleotide
  source 1..17: mol_type = other DNA
tcgtcgatggagcggga

SEQ ID NO: 25423 - DNA, 17 bp, synthetic construct
  misc_feature 1..17: note = Oligonucleotide
  source 1..17: mol_type = other DNA
cgctcgtcgatggagcg

SEQ ID NO: 25424 - DNA, 17 bp, synthetic construct
  misc_feature 1..17: note = Oligonucleotide
  source 1..17: mol_type = other DNA
aggcgctcgtcgatgga

SEQ ID NO: 25425 - DNA, 17 bp, synthetic construct
  misc_feature 1..17: note = Oligonucleotide
  source 1..17: mol_type = other DNA
aggaggcgctcgtcgat

SEQ ID NO: 25426 - DNA, 17 bp, synthetic construct
  misc_feature 1..17: note = Oligonucleotide
  source 1..17: mol_type = other DNA
cccaggaggcgctcgtc

SEQ ID NO: 25427 - DNA, 17 bp, synthetic construct
  misc_feature 1..17: note = Oligonucleotide
  source 1..17: mol_type = other DNA
gtccccaggaggcgctc

SEQ ID NO: 25428 - DNA, 17 bp, synthetic construct
  misc_feature 1..17: note = Oligonucleotide
  source 1..17: mol_type = other DNA
ccggtccccaggaggcg

SEQ ID NO: 25429 - DNA, 17 bp, synthetic construct
  misc_feature 1..17: note = Oligonucleotide
  source 1..17: mol_type = other DNA
gggccggtccccaggag

SEQ ID NO: 25430 - DNA, 17 bp, synthetic construct
  misc_feature 1..17: note = Oligonucleotide
  source 1..17: mol_type = other DNA
gtggggccggtccccag

SEQ ID NO: 25431 - DNA, 17 bp, synthetic construct
  misc_feature 1..17: note = Oligonucleotide
  source 1..17: mol_type = other DNA
gcggtggggccggtccc

SEQ ID NO: 25432 - DNA, 17 bp, synthetic construct
  misc_feature 1..17: note = Oligonucleotide
  source 1..17: mol_type = other DNA
ccggcggtggggccggt

SEQ ID NO: 25433 - DNA, 17 bp, synthetic construct
  misc_feature 1..17: note = Oligonucleotide
  source 1..17: mol_type = other DNA
cggccggcggtggggcc

SEQ ID NO: 25434 - DNA, 17 bp, synthetic construct
  misc_feature 1..17: note = Oligonucleotide
  source 1..17: mol_type = other DNA
tcgcggccggcggtggg

SEQ ID NO: 25435 - DNA, 17 bp, synthetic construct
  misc_feature 1..17: note = Oligonucleotide
  source 1..17: mol_type = other DNA
aggtcgcggccggcggt

SEQ ID NO: 25436 - DNA, 17 bp, synthetic construct
  misc_feature 1..17: note = Oligonucleotide
  source 1..17: mol_type = other DNA
agcaggtcgcggccggc

SEQ ID NO: 25437 - DNA, 17 bp, synthetic construct
  misc_feature 1..17: note = Oligonucleotide
  source 1..17: mol_type = other DNA
agcagcaggtcgcggcc

SEQ ID NO: 25438 - DNA, 17 bp, synthetic construct
  misc_feature 1..17: note = Oligonucleotide
  source 1..17: mol_type = other DNA
ggcagcagcaggtcgcg

SEQ ID NO: 25439 - DNA, 17 bp, synthetic construct
  misc_feature 1..17: note = Oligonucleotide
  source 1..17: mol_type = other DNA
gagggcagcagcaggtc

SEQ ID NO: 25440 - DNA, 17 bp, synthetic construct
  misc_feature 1..17: note = Oligonucleotide
  source 1..17: mol_type = other DNA
ggggagggcagcagcag

SEQ ID NO: 25441 - DNA, 17 bp, synthetic construct
  misc_feature 1..17: note = Oligonucleotide
  source 1..17: mol_type = other DNA
accggggagggcagcag

SEQ ID NO: 25442 - DNA, 17 bp, synthetic construct
  misc_feature 1..17: note = Oligonucleotide
  source 1..17: mol_type = other DNA
gacaccggggagggcag

SEQ ID NO: 25443 - DNA, 17 bp, synthetic construct
  misc_feature 1..17: note = Oligonucleotide
  source 1..17: mol_type = other DNA
gcagacaccggggaggg

SEQ ID NO: 25444 - DNA, 17 bp, synthetic construct
  misc_feature 1..17: note = Oligonucleotide
  source 1..17: mol_type = other DNA
agggcagacaccgggga

SEQ ID NO: 25445 - DNA, 17 bp, synthetic construct
  misc_feature 1..17: note = Oligonucleotide
  source 1..17: mol_type = other DNA
ttcagggcagacaccgg

SEQ ID NO: 25446 - DNA, 17 bp, synthetic construct
  misc_feature 1..17: note = Oligonucleotide
  source 1..17: mol_type = other DNA
ggcttcagggcagacac

SEQ ID NO: 25447 - DNA, 17 bp, synthetic construct
  misc_feature 1..17: note = Oligonucleotide
  source 1..17: mol_type = other DNA
aacggcttcagggcaga

SEQ ID NO: 25448 - DNA, 17 bp, synthetic construct
  misc_feature 1..17: note = Oligonucleotide
  source 1..17: mol_type = other DNA
accaacggcttcagggc

SEQ ID NO: 25449 - DNA, 17 bp, synthetic construct
  misc_feature 1..17: note = Oligonucleotide
  source 1..17: mol_type = other DNA
ctgaccaacggcttcag

SEQ ID NO: 25450 - DNA, 17 bp, synthetic construct
  misc_feature 1..17: note = Oligonucleotide
  source 1..17: mol_type = other DNA
ccgctgaccaacggctt

SEQ ID NO: 25451 - DNA, 17 bp, synthetic construct
  misc_feature 1..17: note = Oligonucleotide
  source 1..17: mol_type = other DNA
gggccgctgaccaacgg

SEQ ID NO: 25452 - DNA, 17 bp, synthetic construct
  misc_feature 1..17: note = Oligonucleotide
  source 1..17: mol_type = other DNA
ctcgggccgctgaccaa

SEQ ID NO: 25453 - DNA, 17 bp, synthetic construct
  misc_feature 1..17: note = Oligonucleotide
  source 1..17: mol_type = other DNA
aggctcgggccgctgac

SEQ ID NO: 25454 - DNA, 17 bp, synthetic construct
  misc_feature 1..17: note = Oligonucleotide
  source 1..17: mol_type = other DNA
cccaggctcgggccgct

SEQ ID NO: 25455 - DNA, 17 bp, synthetic construct
  misc_feature 1..17: note = Oligonucleotide
  source 1..17: mol_type = other DNA
ggccccaggctcgggcc

SEQ ID NO: 25456 - DNA, 17 bp, synthetic construct
  misc_feature 1..17: note = Oligonucleotide
  source 1..17: mol_type = other DNA
gagggccccaggctcgg

SEQ ID NO: 25457 - DNA, 17 bp, synthetic construct
  misc_feature 1..17: note = Oligonucleotide
  source 1..17: mol_type = other DNA
cccgagggccccaggct

SEQ ID NO: 25458 - DNA, 17 bp, synthetic construct
  misc_feature 1..17: note = Oligonucleotide
  source 1..17: mol_type = other DNA
gaacccgagggccccag

SEQ ID NO: 25459 - DNA, 17 bp, synthetic construct
  misc_feature 1..17: note = Oligonucleotide
  source 1..17: mol_type = other DNA
gtggaacccgagggccc

SEQ ID NO: 25460 - DNA, 17 bp, synthetic construct
  misc_feature 1..17: note = Oligonucleotide
  source 1..17: mol_type = other DNA
aaggtggaacccgaggg

SEQ ID NO: 25461 - DNA, 17 bp, synthetic construct
  misc_feature 1..17: note = Oligonucleotide
  source 1..17: mol_type = other DNA
atgaaggtggaacccga

SEQ ID NO: 25462 - DNA, 17 bp, synthetic construct
  misc_feature 1..17: note = Oligonucleotide
  source 1..17: mol_type = other DNA
tggatgaaggtggaacc

SEQ ID NO: 25463 - DNA, 17 bp, synthetic construct
  misc_feature 1..17: note = Oligonucleotide
  source 1..17: mol_type = other DNA
gggtggatgaaggtgga

SEQ ID NO: 25464 - DNA, 17 bp, synthetic construct
  misc_feature 1..17: note = Oligonucleotide
  source 1..17: mol_type = other DNA
agtgggtggatgaaggt

SEQ ID NO: 25465 - DNA, 17 bp, synthetic construct
  misc_feature 1..17: note = Oligonucleotide
  source 1..17: mol_type = other DNA
gtgagtgggtggatgaa

SEQ ID NO: 25466 - DNA, 17 bp, synthetic construct
  misc_feature 1..17: note = Oligonucleotide
  source 1..17: mol_type = other DNA
ccggtgagtgggtggat

SEQ ID NO: 25467 - DNA, 17 bp, synthetic construct
  misc_feature 1..17: note = Oligonucleotide
  source 1..17: mol_type = other DNA
ttgccggtgagtgggtg

SEQ ID NO: 25468 - DNA, 17 bp, synthetic construct
  misc_feature 1..17: note = Oligonucleotide
  source 1..17: mol_type = other DNA
ggtttgccggtgagtgg

SEQ ID NO: 25469 - DNA, 17 bp, synthetic construct
  misc_feature 1..17: note = Oligonucleotide
  source 1..17: mol_type = other DNA
aggggtttgccggtgag

SEQ ID NO: 25470 - DNA, 17 bp, synthetic construct
  misc_feature 1..17: note = Oligonucleotide
  source 1..17: mol_type = other DNA
tccaggggtttgccggt

SEQ ID NO: 25471 - DNA, 17 bp, synthetic construct
  misc_feature 1..17: note = Oligonucleotide
  source 1..17: mol_type = other DNA
gggtccaggggtttgcc

SEQ ID NO: 25472 - DNA, 17 bp, synthetic construct
  misc_feature 1..17: note = Oligonucleotide
  source 1..17: mol_type = other DNA
ctggggtccaggggttt

SEQ ID NO: 25473 - DNA, 17 bp, synthetic construct
  misc_feature 1..17: note = Oligonucleotide
  source 1..17: mol_type = other DNA
gagctggggtccagggg

SEQ ID NO: 25474 - DNA, 17 bp, synthetic construct
  misc_feature 1..17: note = Oligonucleotide
  source 1..17: mol_type = other DNA
ggtgagctggggtccag

SEQ ID NO: 25475 - DNA, 17 bp, synthetic construct
  misc_feature 1..17: note = Oligonucleotide
  source 1..17: mol_type = other DNA
aggggtgagctggggtc

SEQ ID NO: 25476 - DNA, 17 bp, synthetic construct
  misc_feature 1..17: note = Oligonucleotide
  source 1..17: mol_type = other DNA
gccaggggtgagctggg

SEQ ID NO: 25477 - DNA, 17 bp, synthetic construct
  misc_feature 1..17: note = Oligonucleotide
  source 1..17: mol_type = other DNA
agggccaggggtgagct

SEQ ID NO: 25478 - DNA, 17 bp, synthetic construct
  misc_feature 1..17: note = Oligonucleotide
  source 1..17: mol_type = other DNA
gcaagggccaggggtga

SEQ ID NO: 25479 - DNA, 17 bp, synthetic construct
  misc_feature 1..17: note = Oligonucleotide
  source 1..17: mol_type = other DNA
agggcaagggccagggg

SEQ ID NO: 25480 - DNA, 17 bp, synthetic construct
  misc_feature 1..17: note = Oligonucleotide
  source 1..17: mol_type = other DNA
gccagggcaagggccag

SEQ ID NO: 25481 - DNA, 17 bp, synthetic construct
  misc_feature 1..17: note = Oligonucleotide
  source 1..17: mol_type = other DNA
gcagccagggcaagggc

SEQ ID NO: 25482 - DNA, 17 bp, synthetic construct
  misc_feature 1..17: note = Oligonucleotide
  source 1..17: mol_type = other DNA
cgggcagccagggcaag

SEQ ID NO: 25483 - DNA, 17 bp, synthetic construct
  misc_feature 1..17: note = Oligonucleotide
  source 1..17: mol_type = other DNA
tctcgggcagccagggc

SEQ ID NO: 25484 - DNA, 17 bp, synthetic construct
  misc_feature 1..17: note = Oligonucleotide
  source 1..17: mol_type = other DNA
cgctctcgggcagccag

SEQ ID NO: 25485 - DNA, 17 bp, synthetic construct
  misc_feature 1..17: note = Oligonucleotide
  source 1..17: mol_type = other DNA
gctcgctctcgggcagc

SEQ ID NO: 25486 - DNA, 17 bp, synthetic construct
  misc_feature 1..17: note = Oligonucleotide
  source 1..17: mol_type = other DNA
agagctcgctctcgggc

SEQ ID NO: 25487 - DNA, 17 bp, synthetic construct
  misc_feature 1..17: note = Oligonucleotide
  source 1..17: mol_type = other DNA
gccagagctcgctctcg

SEQ ID NO: 25488 - DNA, 17 bp, synthetic construct
  misc_feature 1..17: note = Oligonucleotide
  source 1..17: mol_type = other DNA
gaggccagagctcgctc

SEQ ID NO: 25489 - DNA, 17 bp, synthetic construct
  misc_feature 1..17: note = Oligonucleotide
  source 1..17: mol_type = other DNA
tgggaggccagagctcg

SEQ ID NO: 25490 - DNA, 17 bp, synthetic construct
  misc_feature 1..17: note = Oligonucleotide
  source 1..17: mol_type = other DNA
gcctgggaggccagagc

SEQ ID NO: 25491 - DNA, 17 bp, synthetic construct
  misc_feature 1..17: note = Oligonucleotide
  source 1..17: mol_type = other DNA
ggcgcctgggaggccag

SEQ ID NO: 25492 - DNA, 17 bp, synthetic construct
  misc_feature 1..17: note = Oligonucleotide
  source 1..17: mol_type = other DNA
gagggcgcctgggaggc

SEQ ID NO: 25493 - DNA, 17 bp, synthetic construct
  misc_feature 1..17: note = Oligonucleotide
  source 1..17: mol_type = other DNA
cgggagggcgcctggga

SEQ ID NO: 25494 - DNA, 17 bp, synthetic construct
  misc_feature 1..17: note = Oligonucleotide
  source 1..17: mol_type = other DNA
gaccgggagggcgcctg

SEQ ID NO: 25495 - DNA, 17 bp, synthetic construct
  misc_feature 1..17: note = Oligonucleotide
  source 1..17: mol_type = other DNA
ggggaccgggagggcgc

SEQ ID NO: 25496 - DNA, 17 bp, synthetic construct
  misc_feature 1..17: note = Oligonucleotide
  source 1..17: mol_type = other DNA
gtgggggaccgggaggg

SEQ ID NO: 25497 - DNA, 17 bp, synthetic construct
  misc_feature 1..17: note = Oligonucleotide
  source 1..17: mol_type = other DNA
ggtgtgggggaccggga

SEQ ID NO: 25498 - DNA, 17 bp, synthetic construct
  misc_feature 1..17: note = Oligonucleotide
  source 1..17: mol_type = other DNA
acgggtgtgggggaccg

SEQ ID NO: 25499 - DNA, 17 bp, synthetic construct
  misc_feature 1..17: note = Oligonucleotide
  source 1..17: mol_type = other DNA
tgcacgggtgtggggga

SEQ ID NO: 25500 - DNA, 17 bp, synthetic construct
  misc_feature 1..17: note = Oligonucleotide
  source 1..17: mol_type = other DNA
ctgtgcacgggtgtggg

SEQ ID NO: 25501 - DNA, 17 bp, synthetic construct
  misc_feature 1..17: note = Oligonucleotide
  source 1..17: mol_type = other DNA
ggactgtgcacgggtgt

SEQ ID NO: 25502 - DNA, 17 bp, synthetic construct
  misc_feature 1..17: note = Oligonucleotide
  source 1..17: mol_type = other DNA
tcgggactgtgcacggg

SEQ ID NO: 25503 - DNA, 17 bp, synthetic construct
  misc_feature 1..17: note = Oligonucleotide
  source 1..17: mol_type = other DNA
gcgtcgggactgtgcac

SEQ ID NO: 25504 - DNA, 17 bp, synthetic construct
  misc_feature 1..17: note = Oligonucleotide
  source 1..17: mol_type = other DNA
tcggcgtcgggactgtg

SEQ ID NO: 25505 - DNA, 17 bp, synthetic construct
  misc_feature 1..17: note = Oligonucleotide
  source 1..17: mol_type = other DNA
cggtcggcgtcgggact

SEQ ID NO: 25506 - DNA, 17 bp, synthetic construct
  misc_feature 1..17: note = Oligonucleotide
  source 1..17: mol_type = other DNA
gggcggtcggcgtcggg

SEQ ID NO: 25507 - DNA, 17 bp, synthetic construct
  misc_feature 1..17: note = Oligonucleotide
  source 1..17: mol_type = other DNA
ccggggcggtcggcgtc

SEQ ID NO: 25508 - DNA, 17 bp, synthetic construct
  misc_feature 1..17: note = Oligonucleotide
  source 1..17: mol_type = other DNA
ggtccggggcggtcggc

SEQ ID NO: 25509 - DNA, 17 bp, synthetic construct
  misc_feature 1..17: note = Oligonucleotide
  source 1..17: mol_type = other DNA
aggggtccggggcggtc

SEQ ID NO: 25510 - DNA, 17 bp, synthetic construct
  misc_feature 1..17: note = Oligonucleotide
  source 1..17: mol_type = other DNA
aacaggggtccggggcg

SEQ ID NO: 25511 - DNA, 17 bp, synthetic construct
  misc_feature 1..17: note = Oligonucleotide
  source 1..17: mol_type = other DNA
acaaacaggggtccggg

SEQ ID NO: 25512 - DNA, 17 bp, synthetic construct
  misc_feature 1..17: note = Oligonucleotide
  source 1..17: mol_type = other DNA
tccacaaacaggggtcc

SEQ ID NO: 25513 - DNA, 17 bp, synthetic construct
  misc_feature 1..17: note = Oligonucleotide
  source 1..17: mol_type = other DNA
acatccacaaacagggg

SEQ ID NO: 25514 - DNA, 17 bp, synthetic construct
  misc_feature 1..17: note = Oligonucleotide
  source 1..17: mol_type = other DNA
tgtacatccacaaacag

SEQ ID NO: 25515 - DNA, 17 bp, synthetic construct
  misc_feature 1..17: note = Oligonucleotide
  source 1..17: mol_type = other DNA
gcctgtacatccacaaa

SEQ ID NO: 25516 - DNA, 17 bp, synthetic construct
  misc_feature 1..17: note = Oligonucleotide
  source 1..17: mol_type = other DNA
cgggcctgtacatccac

SEQ ID NO: 25517 - DNA, 17 bp, synthetic construct
  misc_feature 1..17: note = Oligonucleotide
  source 1..17: mol_type = other DNA
tcccgggcctgtacatc

SEQ ID NO: 25518 - DNA, 17 bp, synthetic construct
  misc_feature 1..17: note = Oligonucleotide
  source 1..17: mol_type = other DNA
gggtcccgggcctgtac

SEQ ID NO: 25519 - DNA, 17 bp, synthetic construct
  misc_feature 1..17: note = Oligonucleotide
  source 1..17: mol_type = other DNA
tctgggtcccgggcctg

SEQ ID NO: 25520 - DNA, 17 bp, synthetic construct
  misc_feature 1..17: note = Oligonucleotide
  source 1..17: mol_type = other DNA
cgctctgggtcccgggc

SEQ ID NO: 25521 - DNA, 17 bp, synthetic construct
  misc_feature 1..17: note = Oligonucleotide
  source 1..17: mol_type = other DNA
cctcgctctgggtcccg

SEQ ID NO: 25522 - DNA, 17 bp, synthetic construct
  misc_feature 1..17: note = Oligonucleotide
  source 1..17: mol_type = other DNA
gaccctcgctctgggtc

SEQ ID NO: 25523 - DNA, 17 bp, synthetic construct
  misc_feature 1..17: note = Oligonucleotide
  source 1..17: mol_type = other DNA
agggaccctcgctctgg

SEQ ID NO: 25524 - DNA, 17 bp, synthetic construct
  misc_feature 1..17: note = Oligonucleotide
  source 1..17: mol_type = other DNA
gccagggaccctcgctc

SEQ ID NO: 25525 - DNA, 17 bp, synthetic construct
  misc_feature 1..17: note = Oligonucleotide
  source 1..17: mol_type = other DNA
gaagccagggaccctcg

SEQ ID NO: 25526 - DNA, 17 bp, synthetic construct
  misc_feature 1..17: note = Oligonucleotide
  source 1..17: mol_type = other DNA
ggggaagccagggaccc

SEQ ID NO: 25527 - DNA, 17 bp, synthetic construct
  misc_feature 1..17: note = Oligonucleotide
  source 1..17: mol_type = other DNA
gccggggaagccaggga

SEQ ID NO: 25528 - DNA, 17 bp, synthetic construct
  misc_feature 1..17: note = Oligonucleotide
  source 1..17: mol_type = other DNA
aaagccggggaagccag

SEQ ID NO: 25529 - DNA, 17 bp, synthetic construct
  misc_feature 1..17: note = Oligonucleotide
  source 1..17: mol_type = other DNA
gagaaagccggggaagc

SEQ ID NO: 25530 - DNA, 17 bp, synthetic construct
  misc_feature 1..17: note = Oligonucleotide
  source 1..17: mol_type = other DNA
ggggagaaagccgggga

SEQ ID NO: 25531 - DNA, 17 bp, synthetic construct
  misc_feature 1..17: note = Oligonucleotide
  source 1..17: mol_type = other DNA
cgtggggagaaagccgg

SEQ ID NO: 25532 - DNA, 17 bp, synthetic construct
  misc_feature 1..17: note = Oligonucleotide
  source 1..17: mol_type = other DNA
ctccgtggggagaaagc

SEQ ID NO: 25533 - DNA, 17 bp, synthetic construct
  misc_feature 1..17: note = Oligonucleotide
  source 1..17: mol_type = other DNA
gggctccgtggggagaa

SEQ ID NO: 25534 - DNA, 17 bp, synthetic construct
  misc_feature 1..17: note = Oligonucleotide
  source 1..17: mol_type = other DNA
gctgggctccgtgggga

SEQ ID NO: 25535 - DNA, 17 bp, synthetic construct
  misc_feature 1..17: note = Oligonucleotide
  source 1..17: mol_type = other DNA
caggctgggctccgtgg

SEQ ID NO: 25536 - DNA, 17 bp, synthetic construct
  misc_feature 1..17: note = Oligonucleotide
  source 1..17: mol_type = other DNA
atccaggctgggctccg

SEQ ID NO: 25537 - DNA, 17 bp, synthetic construct
  misc_feature 1..17: note = Oligonucleotide
  source 1..17: mol_type = other DNA
ggaatccaggctgggct

SEQ ID NO: 25538 - DNA, 17 bp, synthetic construct
  misc_feature 1..17: note = Oligonucleotide
  source 1..17: mol_type = other DNA
acaggaatccaggctgg

SEQ ID NO: 25539 - DNA, 17 bp, synthetic construct
  misc_feature 1..17: note = Oligonucleotide
  source 1..17: mol_type = other DNA
ggcacaggaatccaggc

SEQ ID NO: 25540 - DNA, 17 bp, synthetic construct
  misc_feature 1..17: note = Oligonucleotide
  source 1..17: mol_type = other DNA
gcaggcacaggaatcca

SEQ ID NO: 25541 - DNA, 17 bp, synthetic construct
  misc_feature 1..17: note = Oligonucleotide
  source 1..17: mol_type = other DNA
cgagcaggcacaggaat

SEQ ID NO: 25542 - DNA, 17 bp, synthetic construct
  misc_feature 1..17: note = Oligonucleotide
  source 1..17: mol_type = other DNA
ctgcgagcaggcacagg

SEQ ID NO: 25543 - DNA, 17 bp, synthetic construct
  misc_feature 1..17: note = Oligonucleotide
  source 1..17: mol_type = other DNA
tccctgcgagcaggcac

SEQ ID NO: 25544 - DNA, 17 bp, synthetic construct
  misc_feature 1..17: note = Oligonucleotide
  source 1..17: mol_type = other DNA
gcctccctgcgagcagg

SEQ ID NO: 25545 - DNA, 17 bp, synthetic construct
  misc_feature 1..17: note = Oligonucleotide
  source 1..17: mol_type = other DNA
tctgcctccctgcgagc

SEQ ID NO: 25546 - DNA, 17 bp, synthetic construct
  misc_feature 1..17: note = Oligonucleotide
  source 1..17: mol_type = other DNA
ttctctgcctccctgcg

SEQ ID NO: 25547 - DNA, 17 bp, synthetic construct
  misc_feature 1..17: note = Oligonucleotide
  source 1..17: mol_type = other DNA
accttctctgcctccct

SEQ ID NO: 25548 - DNA, 17 bp, synthetic construct
  misc_feature 1..17: note = Oligonucleotide
  source 1..17: mol_type = other DNA
gggaccttctctgcctc

SEQ ID NO: 25549 - DNA, 17 bp, synthetic construct
  misc_feature 1..17: note = Oligonucleotide
  source 1..17: mol_type = other DNA
cgggggaccttctctgc

SEQ ID NO: 25550 - DNA, 17 bp, synthetic construct
  misc_feature 1..17: note = Oligonucleotide
  source 1..17: mol_type = other DNA
tcccgggggaccttctc

SEQ ID NO: 25551 - DNA, 17 bp, synthetic construct
  misc_feature 1..17: note = Oligonucleotide
  source 1..17: mol_type = other DNA
tcctcccgggggacctt

SEQ ID NO: 25552 - DNA, 17 bp, synthetic construct
  misc_feature 1..17: note = Oligonucleotide
  source 1..17: mol_type = other DNA
cgctcctcccgggggac

SEQ ID NO: 25553 - DNA, 17 bp, synthetic construct
  misc_feature 1..17: note = Oligonucleotide
  source 1..17: mol_type = other DNA
ttccgctcctcccgggg

SEQ ID NO: 25554 - DNA, 17 bp, synthetic construct
  misc_feature 1..17: note = Oligonucleotide
  source 1..17: mol_type = other DNA
gacttccgctcctcccg

SEQ ID NO: 25555 - DNA, 17 bp, synthetic construct
  misc_feature 1..17: note = Oligonucleotide
  source 1..17: mol_type = other DNA
ggtgacttccgctcctc

SEQ ID NO: 25556 - DNA, 17 bp, synthetic construct
  misc_feature 1..17: note = Oligonucleotide
  source 1..17: mol_type = other DNA
tcgggtgacttccgctc

SEQ ID NO: 25557 - DNA, 17 bp, synthetic construct
  misc_feature 1..17: note = Oligonucleotide
  source 1..17: mol_type = other DNA
tcctcgggtgacttccg

SEQ ID NO: 25558 - DNA, 17 bp, synthetic construct
  misc_feature 1..17: note = Oligonucleotide
  source 1..17: mol_type = other DNA
ttgtcctcgggtgactt

SEQ ID NO: 25559 - DNA, 17 bp, synthetic construct
  misc_feature 1..17: note = Oligonucleotide
  source 1..17: mol_type = other DNA
ttcttgtcctcgggtga

SEQ ID NO: 25560 - DNA, 17 bp, synthetic construct
  misc_feature 1..17: note = Oligonucleotide
  source 1..17: mol_type = other DNA
gacttcttgtcctcggg

SEQ ID NO: 25561 - DNA, 17 bp, synthetic construct
  misc_feature 1..17: note = Oligonucleotide
  source 1..17: mol_type = other DNA
atggacttcttgtcctc

SEQ ID NO: 25562 - DNA, 17 bp, synthetic construct
  misc_feature 1..17: note = Oligonucleotide
  source 1..17: mol_type = other DNA
atcatggacttcttgtc

SEQ ID NO: 25563 - DNA, 17 bp, synthetic construct
  misc_feature 1..17: note = Oligonucleotide
  source 1..17: mol_type = other DNA
aggatcatggacttctt

SEQ ID NO: 25564 - DNA, 17 bp, synthetic construct
  misc_feature 1..17: note = Oligonucleotide
  source 1..17: mol_type = other DNA
ctgaggatcatggactt

SEQ ID NO: 25565 - DNA, 17 bp, synthetic construct
  misc_feature 1..17: note = Oligonucleotide
  source 1..17: mol_type = other DNA
acgctgaggatcatgga

SEQ ID NO: 25566 - DNA, 17 bp, synthetic construct
  misc_feature 1..17: note = Oligonucleotide
  source 1..17: mol_type = other DNA
aggacgctgaggatcat

SEQ ID NO: 25567 - DNA, 17 bp, synthetic construct
  misc_feature 1..17: note = Oligonucleotide
  source 1..17: mol_type = other DNA
tccaggacgctgaggat

SEQ ID NO: 25568 - DNA, 17 bp, synthetic construct
  misc_feature 1..17: note = Oligonucleotide
  source 1..17: mol_type = other DNA
gtgtccaggacgctgag

SEQ ID NO: 25569 - DNA, 17 bp, synthetic construct
  misc_feature 1..17: note = Oligonucleotide
  source 1..17: mol_type = other DNA
gatgtgtccaggacgct

SEQ ID NO: 25570 - DNA, 17 bp, synthetic construct
  misc_feature 1..17: note = Oligonucleotide
  source 1..17: mol_type = other DNA
agggatgtgtccaggac

SEQ ID NO: 25571 - DNA, 17 bp, synthetic construct
  misc_feature 1..17: note = Oligonucleotide
  source 1..17: mol_type = other DNA
tgcagggatgtgtccag

SEQ ID NO: 25572 - DNA, 17 bp, synthetic construct
  misc_feature 1..17: note = Oligonucleotide
  source 1..17: mol_type = other DNA
cgctgcagggatgtgtc

SEQ ID NO: 25573 - DNA, 17 bp, synthetic construct
  misc_feature 1..17: note = Oligonucleotide
  source 1..17: mol_type = other DNA
ggccgctgcagggatgt

SEQ ID NO: 25574 - DNA, 17 bp, synthetic construct
  misc_feature 1..17: note = Oligonucleotide
  source 1..17: mol_type = other DNA
gctggccgctgcaggga

SEQ ID NO: 25575 - DNA, 17 bp, synthetic construct
  misc_feature 1..17: note = Oligonucleotide
  source 1..17: mol_type = other DNA
ccagctggccgctgcag

SEQ ID NO: 25576 - DNA, 17 bp, synthetic construct
  misc_feature 1..17: note = Oligonucleotide
  source 1..17: mol_type = other DNA
aggccagctggccgctg

SEQ ID NO: 25577 - DNA, 17 bp, synthetic construct
  misc_feature 1..17: note = Oligonucleotide
  source 1..17: mol_type = other DNA
atgaggccagctggccg

SEQ ID NO: 25578 - DNA, 17 bp, synthetic construct
  misc_feature 1..17: note = Oligonucleotide
  source 1..17: mol_type = other DNA
acgatgaggccagctgg

SEQ ID NO: 25579 - DNA, 17 bp, synthetic construct
  misc_feature 1..17: note = Oligonucleotide
  source 1..17: mol_type = other DNA
acaacgatgaggccagc

SEQ ID NO: 25580 - DNA, 17 bp, synthetic construct
  misc_feature 1..17: note = Oligonucleotide
  source 1..17: mol_type = other DNA
tgcacaacgatgaggcc

SEQ ID NO: 25581 - DNA, 17 bp, synthetic construct
  misc_feature 1..17: note = Oligonucleotide
  source 1..17: mol_type = other DNA
gcgtgcacaacgatgag

SEQ ID NO: 25582 - DNA, 17 bp, synthetic construct
  misc_feature 1..17: note = Oligonucleotide
  source 1..17: mol_type = other DNA
gtggcgtgcacaacgat

SEQ ID NO: 25583 - DNA, 17 bp, synthetic construct
  misc_feature 1..17: note = Oligonucleotide
  source 1..17: mol_type = other DNA
ctggtggcgtgcacaac

SEQ ID NO: 25584 - DNA, 17 bp, synthetic construct
  misc_feature 1..17: note = Oligonucleotide
  source 1..17: mol_type = other DNA
ttgctggtggcgtgcac

SEQ ID NO: 25585 - DNA, 17 bp, synthetic construct
  misc_feature 1..17: note = Oligonucleotide
  source 1..17: mol_type = other DNA
ccgttgctggtggcgtg

SEQ ID NO: 25586 - DNA, 17 bp, synthetic construct
  misc_feature 1..17: note = Oligonucleotide
  source 1..17: mol_type = other DNA
tgcccgttgctggtggc

SEQ ID NO: 25587 - DNA, 17 bp, synthetic construct
  misc_feature 1..17: note = Oligonucleotide
  source 1..17: mol_type = other DNA
tcctgcccgttgctggt

SEQ ID NO: 25588 - DNA, 17 bp, synthetic construct
  misc_feature 1..17: note = Oligonucleotide
  source 1..17: mol_type = other DNA
ggctcctgcccgttgct

SEQ ID NO: 25589 - DNA, 17 bp, synthetic construct
  misc_feature 1..17: note = Oligonucleotide
  source 1..17: mol_type = other DNA
ctgggctcctgcccgtt

SEQ ID NO: 25590 - DNA, 17 bp, synthetic construct
  misc_feature 1..17: note = Oligonucleotide
  source 1..17: mol_type = other DNA
ctgctgggctcctgccc

SEQ ID NO: 25591 - DNA, 17 bp, synthetic construct
  misc_feature 1..17: note = Oligonucleotide
  source 1..17: mol_type = other DNA
agcctgctgggctcctg

SEQ ID NO: 25592 - DNA, 17 bp, synthetic construct
  misc_feature 1..17: note = Oligonucleotide
  source 1..17: mol_type = other DNA
cccagcctgctgggctc

SEQ ID NO: 25593 - DNA, 17 bp, synthetic construct
  misc_feature 1..17: note = Oligonucleotide
  source 1..17: mol_type = other DNA
ccccccagcctgctggg

SEQ ID NO: 25594 - DNA, 17 bp, synthetic construct
  misc_feature 1..17: note = Oligonucleotide
  source 1..17: mol_type = other DNA
gccccccccagcctgct

SEQ ID NO: 25595 - DNA, 17 bp, synthetic construct
  misc_feature 1..17: note = Oligonucleotide
  source 1..17: mol_type = other DNA
tcggccccccccagcct

SEQ ID NO: 25596 - DNA, 17 bp, synthetic construct
  misc_feature 1..17: note = Oligonucleotide
  source 1..17: mol_type = other DNA
tcttcggccccccccag

SEQ ID NO: 25597 - DNA, 17 bp, synthetic construct
  misc_feature 1..17: note = Oligonucleotide
  source 1..17: mol_type = other DNA
tcctcttcggccccccc

SEQ ID NO: 25598 - DNA, 17 bp, synthetic construct
  misc_feature 1..17: note = Oligonucleotide
  source 1..17: mol_type = other DNA
cgctcctcttcggcccc

SEQ ID NO: 25599 - DNA, 17 bp, synthetic construct
  misc_feature 1..17: note = Oligonucleotide
  source 1..17: mol_type = other DNA
gggcgctcctcttcggc

SEQ ID NO: 25600 - DNA, 17 bp, synthetic construct
  misc_feature 1..17: note = Oligonucleotide
  source 1..17: mol_type = other DNA
cccgggcgctcctcttc

SEQ ID NO: 25601 - DNA, 17 bp, synthetic construct
  misc_feature 1..17: note = Oligonucleotide
  source 1..17: mol_type = other DNA
gtgcccgggcgctcctc

SEQ ID NO: 25602 - DNA, 17 bp, synthetic construct
  misc_feature 1..17: note = Oligonucleotide
  source 1..17: mol_type = other DNA
ggggtgcccgggcgctc

SEQ ID NO: 25603 - DNA, 17 bp, synthetic construct
  misc_feature 1..17: note = Oligonucleotide
  source 1..17: mol_type = other DNA
tccggggtgcccgggcg

SEQ ID NO: 25604 - DNA, 17 bp, synthetic construct
  misc_feature 1..17: note = Oligonucleotide
  source 1..17: mol_type = other DNA
aactccggggtgcccgg

SEQ ID NO: 25605 - DNA, 17 bp, synthetic construct
  misc_feature 1..17: note = Oligonucleotide
  source 1..17: mol_type = other DNA
gccaactccggggtgcc

SEQ ID NO: 25606 - DNA, 17 bp, synthetic construct
  misc_feature 1..17: note = Oligonucleotide
  source 1..17: mol_type = other DNA
ggggccaactccggggt

SEQ ID NO: 25607 - DNA, 17 bp, synthetic construct
  misc_feature 1..17: note = Oligonucleotide
  source 1..17: mol_type = other DNA
gccggggccaactccgg

SEQ ID NO: 25608 - DNA, 17 bp, synthetic construct
  misc_feature 1..17: note = Oligonucleotide
  source 1..17: mol_type = other DNA
ggggccggggccaactc

SEQ ID NO: 25609 - DNA, 17 bp, synthetic construct
  misc_feature 1..17: note = Oligonucleotide
  source 1..17: mol_type = other DNA
atgggggccggggccaa

SEQ ID NO: 25610 - DNA, 17 bp, synthetic construct
  misc_feature 1..17: note = Oligonucleotide
  source 1..17: mol_type = other DNA
tgcatgggggccggggc

SEQ ID NO: 25611 - DNA, 17 bp, synthetic construct
  misc_feature 1..17: note = Oligonucleotide
  source 1..17: mol_type = other DNA
gactgcatgggggccgg

SEQ ID NO: 25612 - DNA, 17 bp, synthetic construct
  misc_feature 1..17: note = Oligonucleotide
  source 1..17: mol_type = other DNA
gctgactgcatgggggc

SEQ ID NO: 25613 - DNA, 17 bp, synthetic construct
  misc_feature 1..17: note = Oligonucleotide
  source 1..17: mol_type = other DNA
gccgctgactgcatggg

SEQ ID NO: 25614 - DNA, 17 bp, synthetic construct
  misc_feature 1..17: note = Oligonucleotide
  source 1..17: mol_type = other DNA
acagccgctgactgcat

SEQ ID NO: 25615 - DNA, 17 bp, synthetic construct
  misc_feature 1..17: note = Oligonucleotide
  source 1..17: mol_type = other DNA
gccacagccgctgactg

SEQ ID NO: 25616 - DNA, 17 bp, synthetic construct
  misc_feature 1..17: note = Oligonucleotide
  source 1..17: mol_type = other DNA
tctgccacagccgctga

SEQ ID NO: 25617 - DNA, 17 bp, synthetic construct
  misc_feature 1..17: note = Oligonucleotide
  source 1..17: mol_type = other DNA
ggctctgccacagccgc

SEQ ID NO: 25618 - DNA, 17 bp, synthetic construct
  misc_feature 1..17: note = Oligonucleotide
  source 1..17: mol_type = other DNA
aggggctctgccacagc

SEQ ID NO: 25619 - DNA, 17 bp, synthetic construct
  misc_feature 1..17: note = Oligonucleotide
  source 1..17: mol_type = other DNA
ggcaggggctctgccac

SEQ ID NO: 25620 - DNA, 17 bp, synthetic construct
  misc_feature 1..17: note = Oligonucleotide
  source 1..17: mol_type = other DNA
ctgggcaggggctctgc

SEQ ID NO: 25621 - DNA, 17 bp, synthetic construct
  misc_feature 1..17: note = Oligonucleotide
  source 1..17: mol_type = other DNA
gggctgggcaggggctc

SEQ ID NO: 25622 - DNA, 17 bp, synthetic construct
  misc_feature 1..17: note = Oligonucleotide
  source 1..17: mol_type = other DNA
cgggggctgggcagggg

SEQ ID NO: 25623 - DNA, 17 bp, synthetic construct
  misc_feature 1..17: note = Oligonucleotide
  source 1..17: mol_type = other DNA
gcccgggggctgggcag

SEQ ID NO: 25624 - DNA, 17 bp, synthetic construct
  misc_feature 1..17: note = Oligonucleotide
  source 1..17: mol_type = other DNA
tgggcccgggggctggg

SEQ ID NO: 25625 - DNA, 17 bp, synthetic construct
  misc_feature 1..17: note = Oligonucleotide
  source 1..17: mol_type = other DNA
ggctgggcccgggggct

SEQ ID NO: 25626 - DNA, 17 bp, synthetic construct
  misc_feature 1..17: note = Oligonucleotide
  source 1..17: mol_type = other DNA
gggggctgggcccgggg

SEQ ID NO: 25627 - DNA, 17 bp, synthetic construct
  misc_feature 1..17: note = Oligonucleotide
  source 1..17: mol_type = other DNA
ccagggggctgggcccg

SEQ ID NO: 25628 - DNA, 17 bp, synthetic construct
  misc_feature 1..17: note = Oligonucleotide
  source 1..17: mol_type = other DNA
ccaccagggggctgggc

SEQ ID NO: 25629 - DNA, 17 bp, synthetic construct
  misc_feature 1..17: note = Oligonucleotide
  source 1..17: mol_type = other DNA
gtgccaccagggggctg

SEQ ID NO: 25630 - DNA, 17 bp, synthetic construct
  misc_feature 1..17: note = Oligonucleotide
  source 1..17: mol_type = other DNA
ggggtgccaccaggggg

SEQ ID NO: 25631 - DNA, 17 bp, synthetic construct
  misc_feature 1..17: note = Oligonucleotide
  source 1..17: mol_type = other DNA
gccggggtgccaccagg

SEQ ID NO: 25632 - DNA, 17 bp, synthetic construct
  misc_feature 1..17: note = Oligonucleotide
  source 1..17: mol_type = other DNA
tctgccggggtgccacc

SEQ ID NO: 25633 - DNA, 17 bp, synthetic construct
  misc_feature 1..17: note = Oligonucleotide
  source 1..17: mol_type = other DNA
gcgtctgccggggtgcc

SEQ ID NO: 25634 - DNA, 17 bp, synthetic construct
  misc_feature 1..17: note = Oligonucleotide
  source 1..17: mol_type = other DNA
ccggcgtctgccggggt

SEQ ID NO: 25635 - DNA, 17 bp, synthetic construct
  misc_feature 1..17: note = Oligonucleotide
  source 1..17: mol_type = other DNA
ggcccggcgtctgccgg

SEQ ID NO: 25636 - DNA, 17 bp, synthetic construct
  misc_feature 1..17: note = Oligonucleotide
  source 1..17: mol_type = other DNA
cctggcccggcgtctgc

SEQ ID NO: 25637 - DNA, 17 bp, synthetic construct
  misc_feature 1..17: note = Oligonucleotide
  source 1..17: mol_type = other DNA
tggcctggcccggcgtc

SEQ ID NO: 25638 - DNA, 17 bp, synthetic construct
  misc_feature 1..17: note = Oligonucleotide
  source 1..17: mol_type = other DNA
ccctggcctggcccggc

SEQ ID NO: 25639 - DNA, 17 bp, synthetic construct
  misc_feature 1..17: note = Oligonucleotide
  source 1..17: mol_type = other DNA
ctgccctggcctggccc

SEQ ID NO: 25640 - DNA, 17 bp, synthetic construct
  misc_feature 1..17: note = Oligonucleotide
  source 1..17: mol_type = other DNA
gagctgccctggcctgg

SEQ ID NO: 25641 - DNA, 17 bp, synthetic construct
  misc_feature 1..17: note = Oligonucleotide
  source 1..17: mol_type = other DNA
tctgagctgccctggcc

SEQ ID NO: 25642 - DNA, 17 bp, synthetic construct
  misc_feature 1..17: note = Oligonucleotide
  source 1..17: mol_type = other DNA
tcctctgagctgccctg

SEQ ID NO: 25643 - DNA, 17 bp, synthetic construct
  misc_feature 1..17: note = Oligonucleotide
  source 1..17: mol_type = other DNA
tcttcctctgagctgcc

SEQ ID NO: 25644 - DNA, 17 bp, synthetic construct
  misc_feature 1..17: note = Oligonucleotide
  source 1..17: mol_type = other DNA
ggctcttcctctgagct

SEQ ID NO: 25645 - DNA, 17 bp, synthetic construct
  misc_feature 1..17: note = Oligonucleotide
  source 1..17: mol_type = other DNA
tctggctcttcctctga

SEQ ID NO: 25646 - DNA, 17 bp, synthetic construct
  misc_feature 1..17: note = Oligonucleotide
  source 1..17: mol_type = other DNA
agctctggctcttcctc

SEQ ID NO: 25647 - DNA, 17 bp, synthetic construct
  misc_feature 1..17: note = Oligonucleotide
  source 1..17: mol_type = other DNA
accagctctggctcttc

SEQ ID NO: 25648 - DNA, 17 bp, synthetic construct
  misc_feature 1..17: note = Oligonucleotide
  source 1..17: mol_type = other DNA
aacaccagctctggctc

SEQ ID NO: 25649 - DNA, 17 bp, synthetic construct
  misc_feature 1..17: note = Oligonucleotide
  source 1..17: mol_type = other DNA
gcaaacaccagctctgg

SEQ ID NO: 25650 - DNA, 17 bp, synthetic construct
  misc_feature 1..17: note = Oligonucleotide
  source 1..17: mol_type = other DNA
acagcaaacaccagctc

SEQ ID NO: 25651 - DNA, 17 bp, synthetic construct
  misc_feature 1..17: note = Oligonucleotide
  source 1..17: mol_type = other DNA
ttcacagcaaacaccag

SEQ ID NO: 25652 - DNA, 17 bp, synthetic construct
  misc_feature 1..17: note = Oligonucleotide
  source 1..17: mol_type = other DNA
aggttcacagcaaacac

SEQ ID NO: 25653 - DNA, 17 bp, synthetic construct
  misc_feature 1..17: note = Oligonucleotide
  source 1..17: mol_type = other DNA
ggcaggttcacagcaaa

SEQ ID NO: 25654 - DNA, 17 bp, synthetic construct
  misc_feature 1..17: note = Oligonucleotide
  source 1..17: mol_type = other DNA
ggtggcaggttcacagc

SEQ ID NO: 25655 - DNA, 17 bp, synthetic construct
  misc_feature 1..17: note = Oligonucleotide
  source 1..17: mol_type = other DNA
gcaggtggcaggttcac

SEQ ID NO: 25656 - DNA, 17 bp, synthetic construct
  misc_feature 1..17: note = Oligonucleotide
  source 1..17: mol_type = other DNA
tgggcaggtggcaggtt

SEQ ID NO: 25657 - DNA, 17 bp, synthetic construct
  misc_feature 1..17: note = Oligonucleotide
  source 1..17: mol_type = other DNA
agctgggcaggtggcag

SEQ ID NO: 25658 - DNA, 17 bp, synthetic construct
  misc_feature 1..17: note = Oligonucleotide
  source 1..17: mol_type = other DNA
gacagctgggcaggtgg

SEQ ID NO: 25659 - DNA, 17 bp, synthetic construct
  misc_feature 1..17: note = Oligonucleotide
  source 1..17: mol_type = other DNA
gacgacagctgggcagg

SEQ ID NO: 25660 - DNA, 17 bp, synthetic construct
  misc_feature 1..17: note = Oligonucleotide
  source 1..17: mol_type = other DNA
ctggacgacagctgggc

SEQ ID NO: 25661 - DNA, 17 bp, synthetic construct
  misc_feature 1..17: note = Oligonucleotide
  source 1..17: mol_type = other DNA
tcgctggacgacagctg

SEQ ID NO: 25662 - DNA, 17 bp, synthetic construct
  misc_feature 1..17: note = Oligonucleotide
  source 1..17: mol_type = other DNA
tcatcgctggacgacag

SEQ ID NO: 25663 - DNA, 17 bp, synthetic construct
  misc_feature 1..17: note = Oligonucleotide
  source 1..17: mol_type = other DNA
tcctcatcgctggacga

SEQ ID NO: 25664 - DNA, 17 bp, synthetic construct
  misc_feature 1..17: note = Oligonucleotide
  source 1..17: mol_type = other DNA
gtctcctcatcgctgga

SEQ ID NO: 25665 - DNA, 17 bp, synthetic construct
  misc_feature 1..17: note = Oligonucleotide
  source 1..17: mol_type = other DNA
ctggtctcctcatcgct

SEQ ID NO: 25666 - DNA, 17 bp, synthetic construct
  misc_feature 1..17: note = Oligonucleotide
  source 1..17: mol_type = other DNA
tccctggtctcctcatc

SEQ ID NO: 25667 - DNA, 17 bp, synthetic construct
  misc_feature 1..17: note = Oligonucleotide
  source 1..17: mol_type = other DNA
tcctccctggtctcctc

SEQ ID NO: 25668 - DNA, 17 bp, synthetic construct
  misc_feature 1..17: note = Oligonucleotide
  source 1..17: mol_type = other DNA
agctcctccctggtctc

SEQ ID NO: 25669 - DNA, 17 bp, synthetic construct
  misc_feature 1..17: note = Oligonucleotide
  source 1..17: mol_type = other DNA
gccagctcctccctggt

SEQ ID NO: 25670 - DNA, 17 bp, synthetic construct
  misc_feature 1..17: note = Oligonucleotide
  source 1..17: mol_type = other DNA
cgggccagctcctccct

SEQ ID NO: 25671 - DNA, 17 bp, synthetic construct
  misc_feature 1..17: note = Oligonucleotide
  source 1..17: mol_type = other DNA
attcgggccagctcctc

SEQ ID NO: 25672 - DNA, 17 bp, synthetic construct
  misc_feature 1..17: note = Oligonucleotide
  source 1..17: mol_type = other DNA
ccaattcgggccagctc

SEQ ID NO: 25673 - DNA, 17 bp, synthetic construct
  misc_feature 1..17: note = Oligonucleotide
  source 1..17: mol_type = other DNA
aacccaattcgggccag

SEQ ID NO: 25674 - DNA, 17 bp, synthetic construct
  misc_feature 1..17: note = Oligonucleotide
  source 1..17: mol_type = other DNA
accaacccaattcgggc

SEQ ID NO: 25675 - DNA, 17 bp, synthetic construct
  misc_feature 1..17: note = Oligonucleotide
  source 1..17: mol_type = other DNA
ggcaccaacccaattcg

SEQ ID NO: 25676 - DNA, 17 bp, synthetic construct
  misc_feature 1..17: note = Oligonucleotide
  source 1..17: mol_type = other DNA
ggtggcaccaacccaat

SEQ ID NO: 25677 - DNA, 17 bp, synthetic construct
  misc_feature 1..17: note = Oligonucleotide
  source 1..17: mol_type = other DNA
gggggtggcaccaaccc

SEQ ID NO: 25678 - DNA, 17 bp, synthetic construct
  misc_feature 1..17: note = Oligonucleotide
  source 1..17: mol_type = other DNA
tcagggggtggcaccaa

SEQ ID NO: 25679 - DNA, 17 bp, synthetic construct
  misc_feature 1..17: note = Oligonucleotide
  source 1..17: mol_type = other DNA
tcttcagggggtggcac

SEQ ID NO: 25680 - DNA, 17 bp, synthetic construct
  misc_feature 1..17: note = Oligonucleotide
  source 1..17: mol_type = other DNA
aactcttcagggggtgg

SEQ ID NO: 25681 - DNA, 17 bp, synthetic construct
  misc_feature 1..17: note = Oligonucleotide
  source 1..17: mol_type = other DNA
gcaaactcttcaggggg

SEQ ID NO: 25682 - DNA, 17 bp, synthetic construct
  misc_feature 1..17: note = Oligonucleotide
  source 1..17: mol_type = other DNA
ttggcaaactcttcagg

SEQ ID NO: 25683 - DNA, 17 bp, synthetic construct
  misc_feature 1..17: note = Oligonucleotide
  source 1..17: mol_type = other DNA
ccgttggcaaactcttc

SEQ ID NO: 25684 - DNA, 17 bp, synthetic construct
  misc_feature 1..17: note = Oligonucleotide
  source 1..17: mol_type = other DNA
accccgttggcaaactc

SEQ ID NO: 25685 - DNA, 17 bp, synthetic construct
  misc_feature 1..17: note = Oligonucleotide
  source 1..17: mol_type = other DNA
aggaccccgttggcaaa

SEQ ID NO: 25686 - DNA, 17 bp, synthetic construct
  misc_feature 1..17: note = Oligonucleotide
  source 1..17: mol_type = other DNA
agcaggaccccgttggc

SEQ ID NO: 25687 - DNA, 17 bp, synthetic construct
  misc_feature 1..17: note = Oligonucleotide
  source 1..17: mol_type = other DNA
gccagcaggaccccgtt

SEQ ID NO: 25688 - DNA, 17 bp, synthetic construct
  misc_feature 1..17: note = Oligonucleotide
  source 1..17: mol_type = other DNA
gtggccagcaggacccc

SEQ ID NO: 25689 - DNA, 17 bp, synthetic construct
  misc_feature 1..17: note = Oligonucleotide
  source 1..17: mol_type = other DNA
ggggtggccagcaggac

SEQ ID NO: 25690 - DNA, 17 bp, synthetic construct
  misc_feature 1..17: note = Oligonucleotide
  source 1..17: mol_type = other DNA
agtggggtggccagcag

SEQ ID NO: 25691 - DNA, 17 bp, synthetic construct
  misc_feature 1..17: note = Oligonucleotide
  source 1..17: mol_type = other DNA
gcgagtggggtggccag

SEQ ID NO: 25692 - DNA, 17 bp, synthetic construct
  misc_feature 1..17: note = Oligonucleotide
  source 1..17: mol_type = other DNA
ccagcgagtggggtggc

SEQ ID NO: 25693 - DNA, 17 bp, synthetic construct
  misc_feature 1..17: note = Oligonucleotide
  source 1..17: mol_type = other DNA
gggccagcgagtggggt

SEQ ID NO: 25694 - DNA, 17 bp, synthetic construct
  misc_feature 1..17: note = Oligonucleotide
  source 1..17: mol_type = other DNA
cccgggccagcgagtgg

SEQ ID NO: 25695 - DNA, 17 bp, synthetic construct
  misc_feature 1..17: note = Oligonucleotide
  source 1..17: mol_type = other DNA
gggcccgggccagcgag

SEQ ID NO: 25696 - DNA, 17 bp, synthetic construct
  misc_feature 1..17: note = Oligonucleotide
  source 1..17: mol_type = other DNA
gaggggcccgggccagc

SEQ ID NO: 25697 - DNA, 17 bp, synthetic construct
  misc_feature 1..17: note = Oligonucleotide
  source 1..17: mol_type = other DNA
ggcgaggggcccgggcc

SEQ ID NO: 25698 - DNA, 17 bp, synthetic construct
  misc_feature 1..17: note = Oligonucleotide
  source 1..17: mol_type = other DNA
gtgggcgaggggcccgg

SEQ ID NO: 25699 - DNA, 17 bp, synthetic construct
  misc_feature 1..17: note = Oligonucleotide
  source 1..17: mol_type = other DNA
gtggtgggcgaggggcc

SEQ ID NO: 25700 - DNA, 17 bp, synthetic construct
  misc_feature 1..17: note = Oligonucleotide
  source 1..17: mol_type = other DNA
accgtggtgggcgaggg

SEQ ID NO: 25701 - DNA, 17 bp, synthetic construct
  misc_feature 1..17: note = Oligonucleotide
  source 1..17: mol_type = other DNA
ggcaccgtggtgggcga

SEQ ID NO: 25702 - DNA, 17 bp, synthetic construct
  misc_feature 1..17: note = Oligonucleotide
  source 1..17: mol_type = other DNA
ctgggcaccgtggtggg

SEQ ID NO: 25703 - DNA, 17 bp, synthetic construct
  misc_feature 1..17: note = Oligonucleotide
  source 1..17: mol_type = other DNA
gggctgggcaccgtggt

SEQ ID NO: 25704 - DNA, 17 bp, synthetic construct
  misc_feature 1..17: note = Oligonucleotide
  source 1..17: mol_type = other DNA
gccgggctgggcaccgt

SEQ ID NO: 25705 - DNA, 17 bp, synthetic construct
  misc_feature 1..17: note = Oligonucleotide
  source 1..17: mol_type = other DNA
gaggccgggctgggcac

SEQ ID NO: 25706 - DNA, 17 bp, synthetic construct
  misc_feature 1..17: note = Oligonucleotide
  source 1..17: mol_type = other DNA
cctgaggccgggctggg

SEQ ID NO: 25707 - DNA, 17 bp, synthetic construct
  misc_feature 1..17: note = Oligonucleotide
  source 1..17: mol_type = other DNA
ttccctgaggccgggct

SEQ ID NO: 25708 - DNA, 17 bp, synthetic construct
  misc_feature 1..17: note = Oligonucleotide
  source 1..17: mol_type = other DNA
ggcttccctgaggccgg

SEQ ID NO: 25709 - DNA, 17 bp, synthetic construct
  misc_feature 1..17: note = Oligonucleotide
  source 1..17: mol_type = other DNA
ctgggcttccctgaggc

SEQ ID NO: 25710 - DNA, 17 bp, synthetic construct
  misc_feature 1..17: note = Oligonucleotide
  source 1..17: mol_type = other DNA
ctgctgggcttccctga

SEQ ID NO: 25711 - DNA, 17 bp, synthetic construct
  misc_feature 1..17: note = Oligonucleotide
  source 1..17: mol_type = other DNA
tcactgctgggcttccc

SEQ ID NO: 25712 - DNA, 17 bp, synthetic construct
  misc_feature 1..17: note = Oligonucleotide
  source 1..17: mol_type = other DNA
ggctcactgctgggctt

SEQ ID NO: 25713 - DNA, 17 bp, synthetic construct
  misc_feature 1..17: note = Oligonucleotide
  source 1..17: mol_type = other DNA
ggtggctcactgctggg

SEQ ID NO: 25714 - DNA, 17 bp, synthetic construct
  misc_feature 1..17: note = Oligonucleotide
  source 1..17: mol_type = other DNA
gggggtggctcactgct

SEQ ID NO: 25715 - DNA, 17 bp, synthetic construct
  misc_feature 1..17: note = Oligonucleotide
  source 1..17: mol_type = other DNA
gcagggggtggctcact

SEQ ID NO: 25716 - DNA, 17 bp, synthetic construct
  misc_feature 1..17: note = Oligonucleotide
  source 1..17: mol_type = other DNA
ggggcagggggtggctc

SEQ ID NO: 25717 - DNA, 17 bp, synthetic construct
  misc_feature 1..17: note = Oligonucleotide
  source 1..17: mol_type = other DNA
tcaggggcagggggtgg

SEQ ID NO: 25718 - DNA, 17 bp, synthetic construct
  misc_feature 1..17: note = Oligonucleotide
  source 1..17: mol_type = other DNA
gactcaggggcaggggg

SEQ ID NO: 25719 - DNA, 17 bp, synthetic construct
  misc_feature 1..17: note = Oligonucleotide
  source 1..17: mol_type = other DNA
gcagactcaggggcagg

SEQ ID NO: 25720 - DNA, 17 bp, synthetic construct
  misc_feature 1..17: note = Oligonucleotide
  source 1..17: mol_type = other DNA
gctgcagactcaggggc

SEQ ID NO: 25721 - DNA, 17 bp, synthetic construct
  misc_feature 1..17: note = Oligonucleotide
  source 1..17: mol_type = other DNA
tcggctgcagactcagg

SEQ ID NO: 25722 - DNA, 17 bp, synthetic construct
  misc_feature 1..17: note = Oligonucleotide
  source 1..17: mol_type = other DNA
gagtcggctgcagactc

SEQ ID NO: 25723 - DNA, 17 bp, synthetic construct
  misc_feature 1..17: note = Oligonucleotide
  source 1..17: mol_type = other DNA
ccagagtcggctgcaga

SEQ ID NO: 25724 - DNA, 17 bp, synthetic construct
  misc_feature 1..17: note = Oligonucleotide
  source 1..17: mol_type = other DNA
accccagagtcggctgc

SEQ ID NO: 25725 - DNA, 17 bp, synthetic construct
  misc_feature 1..17: note = Oligonucleotide
  source 1..17: mol_type = other DNA
tccaccccagagtcggc

SEQ ID NO: 25726 - DNA, 17 bp, synthetic construct
  misc_feature 1..17: note = Oligonucleotide
  source 1..17: mol_type = other DNA
tcctccaccccagagtc

SEQ ID NO: 25727 - DNA, 17 bp, synthetic construct
  misc_feature 1..17: note = Oligonucleotide
  source 1..17: mol_type = other DNA
gcctcctccaccccaga

SEQ ID NO: 25728 - DNA, 17 bp, synthetic construct
  misc_feature 1..17: note = Oligonucleotide
  source 1..17: mol_type = other DNA
tcagcctcctccacccc

SEQ ID NO: 25729 - DNA, 17 bp, synthetic construct
  misc_feature 1..17: note = Oligonucleotide
  source 1..17: mol_type = other DNA
gtgtcagcctcctccac

SEQ ID NO: 25730 - DNA, 17 bp, synthetic construct
  misc_feature 1..17: note = Oligonucleotide
  source 1..17: mol_type = other DNA
cgtgtgtcagcctcctc

SEQ ID NO: 25731 - DNA, 17 bp, synthetic construct
  misc_feature 1..17: note = Oligonucleotide
  source 1..17: mol_type = other DNA
ctgcgtgtgtcagcctc

SEQ ID NO: 25732 - DNA, 17 bp, synthetic construct
  misc_feature 1..17: note = Oligonucleotide
  source 1..17: mol_type = other DNA
gagctgcgtgtgtcagc

SEQ ID NO: 25733 - DNA, 17 bp, synthetic construct
  misc_feature 1..17: note = Oligonucleotide
  source 1..17: mol_type = other DNA
ctggagctgcgtgtgtc

SEQ ID NO: 25734 - DNA, 17 bp, synthetic construct
  misc_feature 1..17: note = Oligonucleotide
  source 1..17: mol_type = other DNA
tcgctggagctgcgtgt

SEQ ID NO: 25735 - DNA, 17 bp, synthetic construct
  misc_feature 1..17: note = Oligonucleotide
  source 1..17: mol_type = other DNA
gggtcgctggagctgcg

SEQ ID NO: 25736 - DNA, 17 bp, synthetic construct
  misc_feature 1..17: note = Oligonucleotide
  source 1..17: mol_type = other DNA
tgggggtcgctggagct

SEQ ID NO: 25737 - DNA, 17 bp, synthetic construct
  misc_feature 1..17: note = Oligonucleotide
  source 1..17: mol_type = other DNA
aggtgggggtcgctgga

SEQ ID NO: 25738 - DNA, 17 bp, synthetic construct
  misc_feature 1..17: note = Oligonucleotide
  source 1..17: mol_type = other DNA
tccaggtgggggtcgct

SEQ ID NO: 25739 - DNA, 17 bp, synthetic construct
  misc_feature 1..17: note = Oligonucleotide
  source 1..17: mol_type = other DNA
gtctccaggtgggggtc

SEQ ID NO: 25740 - DNA, 17 bp, synthetic construct
  misc_feature 1..17: note = Oligonucleotide
  source 1..17: mol_type = other DNA
gtggtctccaggtgggg

SEQ ID NO: 25741 - DNA, 17 bp, synthetic construct
  misc_feature 1..17: note = Oligonucleotide
  source 1..17: mol_type = other DNA
cttgtggtctccaggtg

SEQ ID NO: 25742 - DNA, 17 bp, synthetic construct
  misc_feature 1..17: note = Oligonucleotide
  source 1..17: mol_type = other DNA
gtgcttgtggtctccag

SEQ ID NO: 25743 - DNA, 17 bp, synthetic construct
  misc_feature 1..17: note = Oligonucleotide
  source 1..17: mol_type = other DNA
atggtgcttgtggtctc

SEQ ID NO: 25744 - DNA, 17 bp, synthetic construct
  misc_feature 1..17: note = Oligonucleotide
  source 1..17: mol_type = other DNA
gagatggtgcttgtggt

SEQ ID NO: 25745 - DNA, 17 bp, synthetic construct
  misc_feature 1..17: note = Oligonucleotide
  source 1..17: mol_type = other DNA
gtggagatggtgcttgt

SEQ ID NO: 25746 - DNA, 17 bp, synthetic construct
  misc_feature 1..17: note = Oligonucleotide
  source 1..17: mol_type = other DNA
accgtggagatggtgct

SEQ ID NO: 25747 - DNA, 17 bp, synthetic construct
  misc_feature 1..17: note = Oligonucleotide
  source 1..17: mol_type = other DNA
gacaccgtggagatggt

SEQ ID NO: 25748 - DNA, 17 bp, synthetic construct
  misc_feature 1..17: note = Oligonucleotide
  source 1..17: mol_type = other DNA
ctggacaccgtggagat

SEQ ID NO: 25749 - DNA, 17 bp, synthetic construct
  misc_feature 1..17: note = Oligonucleotide
  source 1..17: mol_type = other DNA
atgctggacaccgtgga

SEQ ID NO: 25750 - DNA, 17 bp, synthetic construct
  misc_feature 1..17: note = Oligonucleotide
  source 1..17: mol_type = other DNA
gacatgctggacaccgt

SEQ ID NO: 25751 - DNA, 17 bp, synthetic construct
  misc_feature 1..17: note = Oligonucleotide
  source 1..17: mol_type = other DNA
gtggacatgctggacac

SEQ ID NO: 25752 - DNA, 17 bp, synthetic construct
  misc_feature 1..17: note = Oligonucleotide
  source 1..17: mol_type = other DNA
aaggtggacatgctgga

SEQ ID NO: 25753 - DNA, 17 bp, synthetic construct
  misc_feature 1..17: note = Oligonucleotide
  source 1..17: mol_type = other DNA
ctcaaggtggacatgct

SEQ ID NO: 25754 - DNA, 17 bp, synthetic construct
  misc_feature 1..17: note = Oligonucleotide
  source 1..17: mol_type = other DNA
gagctcaaggtggacat

SEQ ID NO: 25755 - DNA, 17 bp, synthetic construct
  misc_feature 1..17: note = Oligonucleotide
  source 1..17: mol_type = other DNA
tccgagctcaaggtgga

SEQ ID NO: 25756 - DNA, 17 bp, synthetic construct
  misc_feature 1..17: note = Oligonucleotide
  source 1..17: mol_type = other DNA
ctctccgagctcaaggt

SEQ ID NO: 25757 - DNA, 17 bp, synthetic construct
  misc_feature 1..17: note = Oligonucleotide
  source 1..17: mol_type = other DNA
ccgctctccgagctcaa

SEQ ID NO: 25758 - DNA, 17 bp, synthetic construct
  misc_feature 1..17: note = Oligonucleotide
  source 1..17: mol_type = other DNA
tccccgctctccgagct

SEQ ID NO: 25759 - DNA, 17 bp, synthetic construct
  misc_feature 1..17: note = Oligonucleotide
  source 1..17: mol_type = other DNA
agttccccgctctccga

SEQ ID NO: 25760 - DNA, 17 bp, synthetic construct
  misc_feature 1..17: note = Oligonucleotide
  source 1..17: mol_type = other DNA
gtgagttccccgctctc

SEQ ID NO: 25761 - DNA, 17 bp, synthetic construct
  misc_feature 1..17: note = Oligonucleotide
  source 1..17: mol_type = other DNA
tcagtgagttccccgct

SEQ ID NO: 25762 - DNA, 17 bp, synthetic construct
  misc_feature 1..17: note = Oligonucleotide
  source 1..17: mol_type = other DNA
gtgtcagtgagttcccc

SEQ ID NO: 25763 - DNA, 17 bp, synthetic construct
  misc_feature 1..17: note = Oligonucleotide
  source 1..17: mol_type = other DNA
tgggtgtcagtgagttc

SEQ ID NO: 25764 - DNA, 17 bp, synthetic construct
  misc_feature 1..17: note = Oligonucleotide
  source 1..17: mol_type = other DNA
gtgtgggtgtcagtgag

SEQ ID NO: 25765 - DNA, 17 bp, synthetic construct
  misc_feature 1..17: note = Oligonucleotide
  source 1..17: mol_type = other DNA
gaggtgtgggtgtcagt

SEQ ID NO: 25766 - DNA, 17 bp, synthetic construct
  misc_feature 1..17: note = Oligonucleotide
  source 1..17: mol_type = other DNA
aaggaggtgtgggtgtc

SEQ ID NO: 25767 - DNA, 17 bp, synthetic construct
  misc_feature 1..17: note = Oligonucleotide
  source 1..17: mol_type = other DNA
gcgaaggaggtgtgggt

SEQ ID NO: 25768 - DNA, 17 bp, synthetic construct
  misc_feature 1..17: note = Oligonucleotide
  source 1..17: mol_type = other DNA
tcagcgaaggaggtgtg

SEQ ID NO: 25769 - DNA, 17 bp, synthetic construct
  misc_feature 1..17: note = Oligonucleotide
  source 1..17: mol_type = other DNA
ccgtcagcgaaggaggt

SEQ ID NO: 25770 - DNA, 17 bp, synthetic construct
  misc_feature 1..17: note = Oligonucleotide
  source 1..17: mol_type = other DNA
tgtccgtcagcgaagga

SEQ ID NO: 25771 - DNA, 17 bp, synthetic construct
  misc_feature 1..17: note = Oligonucleotide
  source 1..17: mol_type = other DNA
gtgtgtccgtcagcgaa

SEQ ID NO: 25772 - DNA, 17 bp, synthetic construct
  misc_feature 1..17: note = Oligonucleotide
  source 1..17: mol_type = other DNA
aaagtgtgtccgtcagc

SEQ ID NO: 25773 - DNA, 17 bp, synthetic construct
  misc_feature 1..17: note = Oligonucleotide
  source 1..17: mol_type = other DNA
agaaaagtgtgtccgtc

SEQ ID NO: 25774 - DNA, 17 bp, synthetic construct
  misc_feature 1..17: note = Oligonucleotide
  source 1..17: mol_type = other DNA
agtagaaaagtgtgtcc

SEQ ID NO: 25775 - DNA, 17 bp, synthetic construct
  misc_feature 1..17: note = Oligonucleotide
  source 1..17: mol_type = other DNA
tcgagtagaaaagtgtg

SEQ ID NO: 25776 - DNA, 17 bp, synthetic construct
  misc_feature 1..17: note = Oligonucleotide
  source 1..17: mol_type = other DNA
ttctcgagtagaaaagt

SEQ ID NO: 25777 - DNA, 17 bp, synthetic construct
  misc_feature 1..17: note = Oligonucleotide
  source 1..17: mol_type = other DNA
ggcttctcgagtagaaa

SEQ ID NO: 25778 - DNA, 17 bp, synthetic construct
  misc_feature 1..17: note = Oligonucleotide
  source 1..17: mol_type = other DNA
ggtggcttctcgagtag

SEQ ID NO: 25779 - DNA, 17 bp, synthetic construct
  misc_feature 1..17: note = Oligonucleotide
  source 1..17: mol_type = other DNA
actggtggcttctcgag

SEQ ID NO: 25780 - DNA, 17 bp, synthetic construct
  misc_feature 1..17: note = Oligonucleotide
  source 1..17: mol_type = other DNA
ggcactggtggcttctc

SEQ ID NO: 25781 - DNA, 17 bp, synthetic construct
  misc_feature 1..17: note = Oligonucleotide
  source 1..17: mol_type = other DNA
ggaggcactggtggctt

SEQ ID NO: 25782 - DNA, 17 bp, synthetic construct
  misc_feature 1..17: note = Oligonucleotide
  source 1..17: mol_type = other DNA
ttgggaggcactggtgg

SEQ ID NO: 25783 - DNA, 17 bp, synthetic construct
  misc_feature 1..17: note = Oligonucleotide
  source 1..17: mol_type = other DNA
ggcttgggaggcactgg

SEQ ID NO: 25784 - DNA, 17 bp, synthetic construct
  misc_feature 1..17: note = Oligonucleotide
  source 1..17: mol_type = other DNA
ttgggcttgggaggcac

SEQ ID NO: 25785 - DNA, 17 bp, synthetic construct
  misc_feature 1..17: note = Oligonucleotide
  source 1..17: mol_type = other DNA
agcttgggcttgggagg

SEQ ID NO: 25786 - DNA, 17 bp, synthetic construct
  misc_feature 1..17: note = Oligonucleotide
  source 1..17: mol_type = other DNA
ttgagcttgggcttggg

SEQ ID NO: 25787 - DNA, 17 bp, synthetic construct
  misc_feature 1..17: note = Oligonucleotide
  source 1..17: mol_type = other DNA
gacttgagcttgggctt

SEQ ID NO: 25788 - DNA, 17 bp, synthetic construct
  misc_feature 1..17: note = Oligonucleotide
  source 1..17: mol_type = other DNA
ggggacttgagcttggg

SEQ ID NO: 25789 - DNA, 17 bp, synthetic construct
  misc_feature 1..17: note = Oligonucleotide
  source 1..17: mol_type = other DNA
agcggggacttgagctt

SEQ ID NO: 25790 - DNA, 17 bp, synthetic construct
  misc_feature 1..17: note = Oligonucleotide
  source 1..17: mol_type = other DNA
cccagcggggacttgag

SEQ ID NO: 25791 - DNA, 17 bp, synthetic construct
  misc_feature 1..17: note = Oligonucleotide
  source 1..17: mol_type = other DNA
ttccccagcggggactt

SEQ ID NO: 25792 - DNA, 17 bp, synthetic construct
  misc_feature 1..17: note = Oligonucleotide
  source 1..17: mol_type = other DNA
cccttccccagcgggga

SEQ ID NO: 25793 - DNA, 17 bp, synthetic construct
  misc_feature 1..17: note = Oligonucleotide
  source 1..17: mol_type = other DNA
ggccccttccccagcgg

SEQ ID NO: 25794 - DNA, 17 bp, synthetic construct
  misc_feature 1..17: note = Oligonucleotide
  source 1..17: mol_type = other DNA
accggccccttccccag

SEQ ID NO: 25795 - DNA, 17 bp, synthetic construct
  misc_feature 1..17: note = Oligonucleotide
  source 1..17: mol_type = other DNA
gtcaccggccccttccc

SEQ ID NO: 25796 - DNA, 17 bp, synthetic construct
  misc_feature 1..17: note = Oligonucleotide
  source 1..17: mol_type = other DNA
aaggtcaccggcccctt

SEQ ID NO: 25797 - DNA, 17 bp, synthetic construct
  misc_feature 1..17: note = Oligonucleotide
  source 1..17: mol_type = other DNA
ctgaaggtcaccggccc

SEQ ID NO: 25798 - DNA, 17 bp, synthetic construct
  misc_feature 1..17: note = Oligonucleotide
  source 1..17: mol_type = other DNA
tccctgaaggtcaccgg

SEQ ID NO: 25799 - DNA, 17 bp, synthetic construct
  misc_feature 1..17: note = Oligonucleotide
  source 1..17: mol_type = other DNA
gggtccctgaaggtcac

SEQ ID NO: 25800 - DNA, 17 bp, synthetic construct
  misc_feature 1..17: note = Oligonucleotide
  source 1..17: mol_type = other DNA
agcgggtccctgaaggt

SEQ ID NO: 25801 - DNA, 17 bp, synthetic construct
  misc_feature 1..17: note = Oligonucleotide
  source 1..17: mol_type = other DNA
agcagcgggtccctgaa

SEQ ID NO: 25802 - DNA, 17 bp, synthetic construct
  misc_feature 1..17: note = Oligonucleotide
  source 1..17: mol_type = other DNA
ttcagcagcgggtccct

SEQ ID NO: 25803 - DNA, 17 bp, synthetic construct
  misc_feature 1..17: note = Oligonucleotide
  source 1..17: mol_type = other DNA
tgcttcagcagcgggtc

SEQ ID NO: 25804 - DNA, 17 bp, synthetic construct
  misc_feature 1..17: note = Oligonucleotide
  source 1..17: mol_type = other DNA
gactgcttcagcagcgg

SEQ ID NO: 25805 - DNA, 17 bp, synthetic construct
  misc_feature 1..17: note = Oligonucleotide
  source 1..17: mol_type = other DNA
gaggactgcttcagcag

SEQ ID NO: 25806 - DNA, 17 bp, synthetic construct
  misc_feature 1..17: note = Oligonucleotide
  source 1..17: mol_type = other DNA
tccgaggactgcttcag

SEQ ID NO: 25807 - DNA, 17 bp, synthetic construct
  misc_feature 1..17: note = Oligonucleotide
  source 1..17: mol_type = other DNA
ctgtccgaggactgctt

SEQ ID NO: 25808 - DNA, 17 bp, synthetic construct
  misc_feature 1..17: note = Oligonucleotide
  source 1..17: mol_type = other DNA
tcgctgtccgaggactg

SEQ ID NO: 25809 - DNA, 17 bp, synthetic construct
  misc_feature 1..17: note = Oligonucleotide
  source 1..17: mol_type = other DNA
agctcgctgtccgagga

SEQ ID NO: 25810 - DNA, 17 bp, synthetic construct
  misc_feature 1..17: note = Oligonucleotide
  source 1..17: mol_type = other DNA
atgagctcgctgtccga

SEQ ID NO: 25811 - DNA, 17 bp, synthetic construct
  misc_feature 1..17: note = Oligonucleotide
  source 1..17: mol_type = other DNA
gccatgagctcgctgtc

SEQ ID NO: 25812 - DNA, 17 bp, synthetic construct
  misc_feature 1..17: note = Oligonucleotide
  source 1..17: mol_type = other DNA
tgggccatgagctcgct

SEQ ID NO: 25813 - DNA, 17 bp, synthetic construct
  misc_feature 1..17: note = Oligonucleotide
  source 1..17: mol_type = other DNA
tgctgggccatgagctc

SEQ ID NO: 25814 - DNA, 17 bp, synthetic construct
  misc_feature 1..17: note = Oligonucleotide
  source 1..17: mol_type = other DNA
tgctgctgggccatgag

SEQ ID NO: 25815 - DNA, 17 bp, synthetic construct
  misc_feature 1..17: note = Oligonucleotide
  source 1..17: mol_type = other DNA
tggtgctgctgggccat

SEQ ID NO: 25816 - DNA, 17 bp, synthetic construct
  misc_feature 1..17: note = Oligonucleotide
  source 1..17: mol_type = other DNA
gcgtggtgctgctgggc

SEQ ID NO: 25817 - DNA, 17 bp, synthetic construct
  misc_feature 1..17: note = Oligonucleotide
  source 1..17: mol_type = other DNA
gcggcgtggtgctgctg

SEQ ID NO: 25818 - DNA, 17 bp, synthetic construct
  misc_feature 1..17: note = Oligonucleotide
  source 1..17: mol_type = other DNA
gaggcggcgtggtgctg

SEQ ID NO: 25819 - DNA, 17 bp, synthetic construct
  misc_feature 1..17: note = Oligonucleotide
  source 1..17: mol_type = other DNA
gcagaggcggcgtggtg

SEQ ID NO: 25820 - DNA, 17 bp, synthetic construct
  misc_feature 1..17: note = Oligonucleotide
  source 1..17: mol_type = other DNA
ccggcagaggcggcgtg

SEQ ID NO: 25821 - DNA, 17 bp, synthetic construct
  misc_feature 1..17: note = Oligonucleotide
  source 1..17: mol_type = other DNA
agcccggcagaggcggc

SEQ ID NO: 25822 - DNA, 17 bp, synthetic construct
  misc_feature 1..17: note = Oligonucleotide
  source 1..17: mol_type = other DNA
gccagcccggcagaggc

SEQ ID NO: 25823 - DNA, 17 bp, synthetic construct
  misc_feature 1..17: note = Oligonucleotide
  source 1..17: mol_type = other DNA
gaggccagcccggcaga

SEQ ID NO: 25824 - DNA, 17 bp, synthetic construct
  misc_feature 1..17: note = Oligonucleotide
  source 1..17: mol_type = other DNA
gcagaggccagcccggc

SEQ ID NO: 25825 - DNA, 17 bp, synthetic construct
  misc_feature 1..17: note = Oligonucleotide
  source 1..17: mol_type = other DNA
gcggcagaggccagccc

SEQ ID NO: 25826 - DNA, 17 bp, synthetic construct
  misc_feature 1..17: note = Oligonucleotide
  source 1..17: mol_type = other DNA
ccggcggcagaggccag

SEQ ID NO: 25827 - DNA, 17 bp, synthetic construct
  misc_feature 1..17: note = Oligonucleotide
  source 1..17: mol_type = other DNA
ggcccggcggcagaggc

SEQ ID NO: 25828 - DNA, 17 bp, synthetic construct
  misc_feature 1..17: note = Oligonucleotide
  source 1..17: mol_type = other DNA
gcaggcccggcggcaga

SEQ ID NO: 25829 - DNA, 17 bp, synthetic construct
  misc_feature 1..17: note = Oligonucleotide
  source 1..17: mol_type = other DNA
cgggcaggcccggcggc

SEQ ID NO: 25830 - DNA, 17 bp, synthetic construct
  misc_feature 1..17: note = Oligonucleotide
  source 1..17: mol_type = other DNA
gggcgggcaggcccggc

SEQ ID NO: 25831 - DNA, 17 bp, synthetic construct
  misc_feature 1..17: note = Oligonucleotide
  source 1..17: mol_type = other DNA
cgagggcgggcaggccc

SEQ ID NO: 25832 - DNA, 17 bp, synthetic construct
  misc_feature 1..17: note = Oligonucleotide
  source 1..17: mol_type = other DNA
tagcgagggcgggcagg

SEQ ID NO: 25833 - DNA, 17 bp, synthetic construct
  misc_feature 1..17: note = Oligonucleotide
  source 1..17: mol_type = other DNA
aggtagcgagggcgggc

SEQ ID NO: 25834 - DNA, 17 bp, synthetic construct
  misc_feature 1..17: note = Oligonucleotide
  source 1..17: mol_type = other DNA
aagaggtagcgagggcg

SEQ ID NO: 25835 - DNA, 17 bp, synthetic construct
  misc_feature 1..17: note = Oligonucleotide
  source 1..17: mol_type = other DNA
tggaagaggtagcgagg

SEQ ID NO: 25836 - DNA, 17 bp, synthetic construct
  misc_feature 1..17: note = Oligonucleotide
  source 1..17: mol_type = other DNA
ctctggaagaggtagcg

SEQ ID NO: 25837 - DNA, 17 bp, synthetic construct
  misc_feature 1..17: note = Oligonucleotide
  source 1..17: mol_type = other DNA
cttctctggaagaggta

SEQ ID NO: 25838 - DNA, 17 bp, synthetic construct
  misc_feature 1..17: note = Oligonucleotide
  source 1..17: mol_type = other DNA
gaccttctctggaagag

SEQ ID NO: 25839 - DNA, 17 bp, synthetic construct
  misc_feature 1..17: note = Oligonucleotide
  source 1..17: mol_type = other DNA
ttggaccttctctggaa

SEQ ID NO: 25840 - DNA, 17 bp, synthetic construct
  misc_feature 1..17: note = Oligonucleotide
  source 1..17: mol_type = other DNA
agcttggaccttctctg

SEQ ID NO: 25841 - DNA, 17 bp, synthetic construct
  misc_feature 1..17: note = Oligonucleotide
  source 1..17: mol_type = other DNA
catagcttggaccttct

SEQ ID NO: 25842 - DNA, 17 bp, synthetic construct
  misc_feature 1..17: note = Oligonucleotide
  source 1..17: mol_type = other DNA
ccccatagcttggacct

SEQ ID NO: 25843 - DNA, 17 bp, synthetic construct
  misc_feature 1..17: note = Oligonucleotide
  source 1..17: mol_type = other DNA
tccccccatagcttgga

SEQ ID NO: 25844 - DNA, 17 bp, synthetic construct
  misc_feature 1..17: note = Oligonucleotide
  source 1..17: mol_type = other DNA
gggtccccccatagctt

SEQ ID NO: 25845 - DNA, 17 bp, synthetic construct
  misc_feature 1..17: note = Oligonucleotide
  source 1..17: mol_type = other DNA
acggggtccccccatag

SEQ ID NO: 25846 - DNA, 17 bp, synthetic construct
  misc_feature 1..17: note = Oligonucleotide
  source 1..17: mol_type = other DNA
tccacggggtcccccca

SEQ ID NO: 25847 - DNA, 17 bp, synthetic construct
  misc_feature 1..17: note = Oligonucleotide
  source 1..17: mol_type = other DNA
ctctccacggggtcccc

SEQ ID NO: 25848 - DNA, 17 bp, synthetic construct
  misc_feature 1..17: note = Oligonucleotide
  source 1..17: mol_type = other DNA
cggctctccacggggtc

SEQ ID NO: 25849 - DNA, 17 bp, synthetic construct
  misc_feature 1..17: note = Oligonucleotide
  source 1..17: mol_type = other DNA
ccccggctctccacggg

SEQ ID NO: 25850 - DNA, 17 bp, synthetic construct
  misc_feature 1..17: note = Oligonucleotide
  source 1..17: mol_type = other DNA
agcccccggctctccac

SEQ ID NO: 25851 - DNA, 17 bp, synthetic construct
  misc_feature 1..17: note = Oligonucleotide
  source 1..17: mol_type = other DNA
gggagcccccggctctc

SEQ ID NO: 25852 - DNA, 17 bp, synthetic construct
  misc_feature 1..17: note = Oligonucleotide
  source 1..17: mol_type = other DNA
ccagggagcccccggct

SEQ ID NO: 25853 - DNA, 17 bp, synthetic construct
  misc_feature 1..17: note = Oligonucleotide
  source 1..17: mol_type = other DNA
ggcccagggagcccccg

SEQ ID NO: 25854 - DNA, 17 bp, synthetic construct
  misc_feature 1..17: note = Oligonucleotide
  source 1..17: mol_type = other DNA
tcaggcccagggagccc

SEQ ID NO: 25855 - DNA, 17 bp, synthetic construct
  misc_feature 1..17: note = Oligonucleotide
  source 1..17: mol_type = other DNA
tcttcaggcccagggag

SEQ ID NO: 25856 - DNA, 17 bp, synthetic construct
  misc_feature 1..17: note = Oligonucleotide
  source 1..17: mol_type = other DNA
tcgtcttcaggcccagg

SEQ ID NO: 25857 - DNA, 17 bp, synthetic construct
  misc_feature 1..17: note = Oligonucleotide
  source 1..17: mol_type = other DNA
ttgtcgtcttcaggccc

SEQ ID NO: 25858 - DNA, 17 bp, synthetic construct
  misc_feature 1..17: note = Oligonucleotide
  source 1..17: mol_type = other DNA
ggtttgtcgtcttcagg

SEQ ID NO: 25859 - DNA, 17 bp, synthetic construct
  misc_feature 1..17: note = Oligonucleotide
  source 1..17: mol_type = other DNA
gttggtttgtcgtcttc

SEQ ID NO: 25860 - DNA, 17 bp, synthetic construct
  misc_feature 1..17: note = Oligonucleotide
  source 1..17: mol_type = other DNA
acagttggtttgtcgtc

SEQ ID NO: 25861 - DNA, 17 bp, synthetic construct
  misc_feature 1..17: note = Oligonucleotide
  source 1..17: mol_type = other DNA
atcacagttggtttgtc

SEQ ID NO: 25862 - DNA, 17 bp, synthetic construct
  misc_feature 1..17: note = Oligonucleotide
  source 1..17: mol_type = other DNA
ctgatcacagttggttt

SEQ ID NO: 25863 - DNA, 17 bp, synthetic construct
  misc_feature 1..17: note = Oligonucleotide
  source 1..17: mol_type = other DNA
tcactgatcacagttgg

SEQ ID NO: 25864 - DNA, 17 bp, synthetic construct
  misc_feature 1..17: note = Oligonucleotide
  source 1..17: mol_type = other DNA
agctcactgatcacagt

SEQ ID NO: 25865 - DNA, 17 bp, synthetic construct
  misc_feature 1..17: note = Oligonucleotide
  source 1..17: mol_type = other DNA
ctgagctcactgatcac

SEQ ID NO: 25866 - DNA, 17 bp, synthetic construct
  misc_feature 1..17: note = Oligonucleotide
  source 1..17: mol_type = other DNA
gagctgagctcactgat

SEQ ID NO: 25867 - DNA, 17 bp, synthetic construct
  misc_feature 1..17: note = Oligonucleotide
  source 1..17: mol_type = other DNA
cgggagctgagctcact

SEQ ID NO: 25868 - DNA, 17 bp, synthetic construct
  misc_feature 1..17: note = Oligonucleotide
  source 1..17: mol_type = other DNA
aggcgggagctgagctc

SEQ ID NO: 25869 - DNA, 17 bp, synthetic construct
  misc_feature 1..17: note = Oligonucleotide
  source 1..17: mol_type = other DNA
tgcaggcgggagctgag

SEQ ID NO: 25870 - DNA, 17 bp, synthetic construct
  misc_feature 1..17: note = Oligonucleotide
  source 1..17: mol_type = other DNA
tgctgcaggcgggagct

SEQ ID NO: 25871 - DNA, 17 bp, synthetic construct
  misc_feature 1..17: note = Oligonucleotide
  source 1..17: mol_type = other DNA
agctgctgcaggcggga

SEQ ID NO: 25872 - DNA, 17 bp, synthetic construct
  misc_feature 1..17: note = Oligonucleotide
  source 1..17: mol_type = other DNA
ttcagctgctgcaggcg

SEQ ID NO: 25873 - DNA, 17 bp, synthetic construct
  misc_feature 1..17: note = Oligonucleotide
  source 1..17: mol_type = other DNA
ttgttcagctgctgcag

SEQ ID NO: 25874 - DNA, 17 bp, synthetic construct
  misc_feature 1..17: note = Oligonucleotide
  source 1..17: mol_type = other DNA
tccttgttcagctgctg

SEQ ID NO: 25875 - DNA, 17 bp, synthetic construct
  misc_feature 1..17: note = Oligonucleotide
  source 1..17: mol_type = other DNA
gtgtccttgttcagctg

SEQ ID NO: 25876 - DNA, 17 bp, synthetic construct
  misc_feature 1..17: note = Oligonucleotide
  source 1..17: mol_type = other DNA
cgcgtgtccttgttcag

SEQ ID NO: 25877 - DNA, 17 bp, synthetic construct
  misc_feature 1..17: note = Oligonucleotide
  source 1..17: mol_type = other DNA
gaacgcgtgtccttgtt

SEQ ID NO: 25878 - DNA, 17 bp, synthetic construct
  misc_feature 1..17: note = Oligonucleotide
  source 1..17: mol_type = other DNA
agggaacgcgtgtcctt

SEQ ID NO: 25879 - DNA, 17 bp, synthetic construct
  misc_feature 1..17: note = Oligonucleotide
  source 1..17: mol_type = other DNA
cccagggaacgcgtgtc

SEQ ID NO: 25880 - DNA, 17 bp, synthetic construct
  misc_feature 1..17: note = Oligonucleotide
  source 1..17: mol_type = other DNA
tcccccagggaacgcgt

SEQ ID NO: 25881 - DNA, 17 bp, synthetic construct
  misc_feature 1..17: note = Oligonucleotide
  source 1..17: mol_type = other DNA
tcctcccccagggaacg

SEQ ID NO: 25882 - DNA, 17 bp, synthetic construct
  misc_feature 1..17: note = Oligonucleotide
  source 1..17: mol_type = other DNA
ggttcctcccccaggga

SEQ ID NO: 25883 - DNA, 17 bp, synthetic construct
  misc_feature 1..17: note = Oligonucleotide
  source 1..17: mol_type = other DNA
actggttcctcccccag

SEQ ID NO: 25884 - DNA, 17 bp, synthetic construct
  misc_feature 1..17: note = Oligonucleotide
  source 1..17: mol_type = other DNA
ccaactggttcctcccc

SEQ ID NO: 25885 - DNA, 17 bp, synthetic construct
  misc_feature 1..17: note = Oligonucleotide
  source 1..17: mol_type = other DNA
ccaccaactggttcctc

SEQ ID NO: 25886 - DNA, 17 bp, synthetic construct
  misc_feature 1..17: note = Oligonucleotide
  source 1..17: mol_type = other DNA
aggccaccaactggttc

SEQ ID NO: 25887 - DNA, 17 bp, synthetic construct
  misc_feature 1..17: note = Oligonucleotide
  source 1..17: mol_type = other DNA
cccaggccaccaactgg

SEQ ID NO: 25888 - DNA, 17 bp, synthetic construct
  misc_feature 1..17: note = Oligonucleotide
  source 1..17: mol_type = other DNA
ctgcccaggccaccaac

SEQ ID NO: 25889 - DNA, 17 bp, synthetic construct
  misc_feature 1..17: note = Oligonucleotide
  source 1..17: mol_type = other DNA
aggctgcccaggccacc

SEQ ID NO: 25890 - DNA, 17 bp, synthetic construct
  misc_feature 1..17: note = Oligonucleotide
  source 1..17: mol_type = other DNA
agcaggctgcccaggcc

SEQ ID NO: 25891 - DNA, 17 bp, synthetic construct
  misc_feature 1..17: note = Oligonucleotide
  source 1..17: mol_type = other DNA
tccagcaggctgcccag

SEQ ID NO: 25892 - DNA, 17 bp, synthetic construct
  misc_feature 1..17: note = Oligonucleotide
  source 1..17: mol_type = other DNA
gggtccagcaggctgcc

SEQ ID NO: 25893 - DNA, 17 bp, synthetic construct
  misc_feature 1..17: note = Oligonucleotide
  source 1..17: mol_type = other DNA
gcagggtccagcaggct

SEQ ID NO: 25894 - DNA, 17 bp, synthetic construct
  misc_feature 1..17: note = Oligonucleotide
  source 1..17: mol_type = other DNA
ttggcagggtccagcag

SEQ ID NO: 25895 - DNA, 17 bp, synthetic construct
  misc_feature 1..17: note = Oligonucleotide
  source 1..17: mol_type = other DNA
ttcttggcagggtccag

SEQ ID NO: 25896 - DNA, 17 bp, synthetic construct
  misc_feature 1..17: note = Oligonucleotide
  source 1..17: mol_type = other DNA
gacttcttggcagggtc

SEQ ID NO: 25897 - DNA, 17 bp, synthetic construct
  misc_feature 1..17: note = Oligonucleotide
  source 1..17: mol_type = other DNA
ggcgacttcttggcagg

SEQ ID NO: 25898 - DNA, 17 bp, synthetic construct
  misc_feature 1..17: note = Oligonucleotide
  source 1..17: mol_type = other DNA
atgggcgacttcttggc

SEQ ID NO: 25899 - DNA, 17 bp, synthetic construct
  misc_feature 1..17: note = Oligonucleotide
  source 1..17: mol_type = other DNA
gcgatgggcgacttctt

SEQ ID NO: 25900 - DNA, 17 bp, synthetic construct
  misc_feature 1..17: note = Oligonucleotide
  source 1..17: mol_type = other DNA
gctgcgatgggcgactt

SEQ ID NO: 25901 - DNA, 17 bp, synthetic construct
  misc_feature 1..17: note = Oligonucleotide
  source 1..17: mol_type = other DNA
gctgctgcgatgggcga

SEQ ID NO: 25902 - DNA, 17 bp, synthetic construct
  misc_feature 1..17: note = Oligonucleotide
  source 1..17: mol_type = other DNA
cgagctgctgcgatggg

SEQ ID NO: 25903 - DNA, 17 bp, synthetic construct
  misc_feature 1..17: note = Oligonucleotide
  source 1..17: mol_type = other DNA
caccgagctgctgcgat

SEQ ID NO: 25904 - DNA, 17 bp, synthetic construct
  misc_feature 1..17: note = Oligonucleotide
  source 1..17: mol_type = other DNA
gctcaccgagctgctgc

SEQ ID NO: 25905 - DNA, 17 bp, synthetic construct
  misc_feature 1..17: note = Oligonucleotide
  source 1..17: mol_type = other DNA
cctgctcaccgagctgc

SEQ ID NO: 25906 - DNA, 17 bp, synthetic construct
  misc_feature 1..17: note = Oligonucleotide
  source 1..17: mol_type = other DNA
cgccctgctcaccgagc

SEQ ID NO: 25907 - DNA, 17 bp, synthetic construct
  misc_feature 1..17: note = Oligonucleotide
  source 1..17: mol_type = other DNA
caccgccctgctcaccg

SEQ ID NO: 25908 - DNA, 17 bp, synthetic construct
  misc_feature 1..17: note = Oligonucleotide
  source 1..17: mol_type = other DNA
agcctgcggagggagag

SEQ ID NO: 25909 - DNA, 17 bp, synthetic construct
  misc_feature 1..17: note = Oligonucleotide
  source 1..17: mol_type = other DNA
aagagcctgcggaggga

SEQ ID NO: 25910 - DNA, 17 bp, synthetic construct
  misc_feature 1..17: note = Oligonucleotide
  source 1..17: mol_type = other DNA
ctgaagagcctgcggag

SEQ ID NO: 25911 - DNA, 17 bp, synthetic construct
  misc_feature 1..17: note = Oligonucleotide
  source 1..17: mol_type = other DNA
ctgctgaagagcctgcg

SEQ ID NO: 25912 - DNA, 17 bp, synthetic construct
  misc_feature 1..17: note = Oligonucleotide
  source 1..17: mol_type = other DNA
aggctgctgaagagcct

SEQ ID NO: 25913 - DNA, 17 bp, synthetic construct
  misc_feature 1..17: note = Oligonucleotide
  source 1..17: mol_type = other DNA
ccgaggctgctgaagag

SEQ ID NO: 25914 - DNA, 17 bp, synthetic construct
  misc_feature 1..17: note = Oligonucleotide
  source 1..17: mol_type = other DNA
tcaccgaggctgctgaa

SEQ ID NO: 25915 - DNA, 17 bp, synthetic construct
  misc_feature 1..17: note = Oligonucleotide
  source 1..17: mol_type = other DNA
agctcaccgaggctgct

SEQ ID NO: 25916 - DNA, 17 bp, synthetic construct
  misc_feature 1..17: note = Oligonucleotide
  source 1..17: mol_type = other DNA
ctcagctcaccgaggct

SEQ ID NO: 25917 - DNA, 17 bp, synthetic construct
  misc_feature 1..17: note = Oligonucleotide
  source 1..17: mol_type = other DNA
gagctcagctcaccgag

SEQ ID NO: 25918 - DNA, 17 bp, synthetic construct
  misc_feature 1..17: note = Oligonucleotide
  source 1..17: mol_type = other DNA
atggagctcagctcacc

SEQ ID NO: 25919 - DNA, 17 bp, synthetic construct
  misc_feature 1..17: note = Oligonucleotide
  source 1..17: mol_type = other DNA
gaaatggagctcagctc

SEQ ID NO: 25920 - DNA, 17 bp, synthetic construct
  misc_feature 1..17: note = Oligonucleotide
  source 1..17: mol_type = other DNA
gctgaaatggagctcag

SEQ ID NO: 25921 - DNA, 17 bp, synthetic construct
  misc_feature 1..17: note = Oligonucleotide
  source 1..17: mol_type = other DNA
tgcgctgaaatggagct

SEQ ID NO: 25922 - DNA, 17 bp, synthetic construct
  misc_feature 1..17: note = Oligonucleotide
  source 1..17: mol_type = other DNA
cgctgcgctgaaatgga

SEQ ID NO: 25923 - DNA, 17 bp, synthetic construct
  misc_feature 1..17: note = Oligonucleotide
  source 1..17: mol_type = other DNA
ctgcgctgcgctgaaat

SEQ ID NO: 25924 - DNA, 17 bp, synthetic construct
  misc_feature 1..17: note = Oligonucleotide
  source 1..17: mol_type = other DNA
gggctgcgctgcgctga

SEQ ID NO: 25925 - DNA, 17 bp, synthetic construct
  misc_feature 1..17: note = Oligonucleotide
  source 1..17: mol_type = other DNA
ccggggctgcgctgcgc

SEQ ID NO: 25926 - DNA, 17 bp, synthetic construct
  misc_feature 1..17: note = Oligonucleotide
  source 1..17: mol_type = other DNA
cccccggggctgcgctg

SEQ ID NO: 25927 - DNA, 17 bp, synthetic construct
  misc_feature 1..17: note = Oligonucleotide
  source 1..17: mol_type = other DNA
gggcccccggggctgcg

SEQ ID NO: 25928 - DNA, 17 bp, synthetic construct
  misc_feature 1..17: note = Oligonucleotide
  source 1..17: mol_type = other DNA
cccgggcccccggggct

SEQ ID NO: 25929 - DNA, 17 bp, synthetic construct
  misc_feature 1..17: note = Oligonucleotide
  source 1..17: mol_type = other DNA
ccgcccgggcccccggg

SEQ ID NO: 25930 - DNA, 17 bp, synthetic construct
  misc_feature 1..17: note = Oligonucleotide
  source 1..17: mol_type = other DNA
ccgccgcccgggccccc

SEQ ID NO: 25931 - DNA, 17 bp, synthetic construct
  misc_feature 1..17: note = Oligonucleotide
  source 1..17: mol_type = other DNA
gccccgccgcccgggcc

SEQ ID NO: 25932 - DNA, 17 bp, synthetic construct
  misc_feature 1..17: note = Oligonucleotide
  source 1..17: mol_type = other DNA
gaggccccgccgcccgg

SEQ ID NO: 25933 - DNA, 17 bp, synthetic construct
  misc_feature 1..17: note = Oligonucleotide
  source 1..17: mol_type = other DNA
tacgaggccccgccgcc

SEQ ID NO: 25934 - DNA, 17 bp, synthetic construct
  misc_feature 1..17: note = Oligonucleotide
  source 1..17: mol_type = other DNA
gagtacgaggccccgcc

SEQ ID NO: 25935 - DNA, 17 bp, synthetic construct
  misc_feature 1..17: note = Oligonucleotide
  source 1..17: mol_type = other DNA
accgagtacgaggcccc

SEQ ID NO: 25936 - DNA, 17 bp, synthetic construct
  misc_feature 1..17: note = Oligonucleotide
  source 1..17: mol_type = other DNA
ctcaccgagtacgaggc

SEQ ID NO: 25937 - DNA, 17 bp, synthetic construct
  misc_feature 1..17: note = Oligonucleotide
  source 1..17: mol_type = other DNA
ggcctcaccgagtacga

SEQ ID NO: 25938 - DNA, 17 bp, synthetic construct
  misc_feature 1..17: note = Oligonucleotide
  source 1..17: mol_type = other DNA
ctgggcctcaccgagta

SEQ ID NO: 25939 - DNA, 17 bp, synthetic construct
  misc_feature 1..17: note = Oligonucleotide
  source 1..17: mol_type = other DNA
ccactgggcctcaccga

SEQ ID NO: 25940 - DNA, 17 bp, synthetic construct
  misc_feature 1..17: note = Oligonucleotide
  source 1..17: mol_type = other DNA
cggccactgggcctcac

SEQ ID NO: 25941 - DNA, 17 bp, synthetic construct
  misc_feature 1..17: note = Oligonucleotide
  source 1..17: mol_type = other DNA
tagcggccactgggcct

SEQ ID NO: 25942 - DNA, 17 bp, synthetic construct
  misc_feature 1..17: note = Oligonucleotide
  source 1..17: mol_type = other DNA
gggtagcggccactggg

SEQ ID NO: 25943 - DNA, 17 bp, synthetic construct
  misc_feature 1..17: note = Oligonucleotide
  source 1..17: mol_type = other DNA
acggggtagcggccact

SEQ ID NO: 25944 - DNA, 17 bp, synthetic construct
  misc_feature 1..17: note = Oligonucleotide
  source 1..17: mol_type = other DNA
gccacggggtagcggcc

SEQ ID NO: 25945 - DNA, 17 bp, synthetic construct
  misc_feature 1..17: note = Oligonucleotide
  source 1..17: mol_type = other DNA
ctcgccacggggtagcg

SEQ ID NO: 25946 - DNA, 17 bp, synthetic construct
  misc_feature 1..17: note = Oligonucleotide
  source 1..17: mol_type = other DNA
cgtctcgccacggggta

SEQ ID NO: 25947 - DNA, 17 bp, synthetic construct
  misc_feature 1..17: note = Oligonucleotide
  source 1..17: mol_type = other DNA
gcgcgtctcgccacggg

SEQ ID NO: 25948 - DNA, 17 bp, synthetic construct
  misc_feature 1..17: note = Oligonucleotide
  source 1..17: mol_type = other DNA
ggggcgcgtctcgccac

SEQ ID NO: 25949 - DNA, 17 bp, synthetic construct
  misc_feature 1..17: note = Oligonucleotide
  source 1..17: mol_type = other DNA
ctcggggcgcgtctcgc

SEQ ID NO: 25950 - DNA, 17 bp, synthetic construct
  misc_feature 1..17: note = Oligonucleotide
  source 1..17: mol_type = other DNA
gggctcggggcgcgtct

SEQ ID NO: 25951 - DNA, 17 bp, synthetic construct
  misc_feature 1..17: note = Oligonucleotide
  source 1..17: mol_type = other DNA
accgggctcggggcgcg

SEQ ID NO: 25952 - DNA, 17 bp, synthetic construct
  misc_feature 1..17: note = Oligonucleotide
  source 1..17: mol_type = other DNA
ttcaccgggctcggggc

SEQ ID NO: 25953 - DNA, 17 bp, synthetic construct
  misc_feature 1..17: note = Oligonucleotide
  source 1..17: mol_type = other DNA
ggcttcaccgggctcgg

SEQ ID NO: 25954 - DNA, 17 bp, synthetic construct
  misc_feature 1..17: note = Oligonucleotide
  source 1..17: mol_type = other DNA
gcgggcttcaccgggct

SEQ ID NO: 25955 - DNA, 17 bp, synthetic construct
  misc_feature 1..17: note = Oligonucleotide
  source 1..17: mol_type = other DNA
gacgcgggcttcaccgg

SEQ ID NO: 25956 - DNA, 17 bp, synthetic construct
  misc_feature 1..17: note = Oligonucleotide
  source 1..17: mol_type = other DNA
agcgacgcgggcttcac

SEQ ID NO: 25957 - DNA, 17 bp, synthetic construct
  misc_feature 1..17: note = Oligonucleotide
  source 1..17: mol_type = other DNA
tccagcgacgcgggctt

SEQ ID NO: 25958 - DNA, 17 bp, synthetic construct
  misc_feature 1..17: note = Oligonucleotide
  source 1..17: mol_type = other DNA
cgctccagcgacgcggg

SEQ ID NO: 25959 - DNA, 17 bp, synthetic construct
  misc_feature 1..17: note = Oligonucleotide
  source 1..17: mol_type = other DNA
acccgctccagcgacgc

SEQ ID NO: 25960 - DNA, 17 bp, synthetic construct
  misc_feature 1..17: note = Oligonucleotide
  source 1..17: mol_type = other DNA
tccacccgctccagcga

SEQ ID NO: 25961 - DNA, 17 bp, synthetic construct
  misc_feature 1..17: note = Oligonucleotide
  source 1..17: mol_type = other DNA
ccctccacccgctccag

SEQ ID NO: 25962 - DNA, 17 bp, synthetic construct
  misc_feature 1..17: note = Oligonucleotide
  source 1..17: mol_type = other DNA
agcccctccacccgctc

SEQ ID NO: 25963 - DNA, 17 bp, synthetic construct
  misc_feature 1..17: note = Oligonucleotide
  source 1..17: mol_type = other DNA
cccagcccctccacccg

SEQ ID NO: 25964 - DNA, 17 bp, synthetic construct
  misc_feature 1..17: note = Oligonucleotide
  source 1..17: mol_type = other DNA
gcccccagcccctccac

SEQ ID NO: 25965 - DNA, 17 bp, synthetic construct
  misc_feature 1..17: note = Oligonucleotide
  source 1..17: mol_type = other DNA
cccgcccccagcccctc

SEQ ID NO: 25966 - DNA, 17 bp, synthetic construct
  misc_feature 1..17: note = Oligonucleotide
  source 1..17: mol_type = other DNA
gcgcccgcccccagccc

SEQ ID NO: 25967 - DNA, 17 bp, synthetic construct
  misc_feature 1..17: note = Oligonucleotide
  source 1..17: mol_type = other DNA
cccgcgcccgcccccag

SEQ ID NO: 25968 - DNA, 17 bp, synthetic construct
  misc_feature 1..17: note = Oligonucleotide
  source 1..17: mol_type = other DNA
ccccccgcgcccgcccc

SEQ ID NO: 25969 - DNA, 17 bp, synthetic construct
  misc_feature 1..17: note = Oligonucleotide
  source 1..17: mol_type = other DNA
gcgccccccgcgcccgc

SEQ ID NO: 25970 - DNA, 17 bp, synthetic construct
  misc_feature 1..17: note = Oligonucleotide
  source 1..17: mol_type = other DNA
cctgcgccccccgcgcc

SEQ ID NO: 25971 - DNA, 17 bp, synthetic construct
  misc_feature 1..17: note = Oligonucleotide
  source 1..17: mol_type = other DNA
cgccctgcgccccccgc

SEQ ID NO: 25972 - DNA, 17 bp, synthetic construct
  misc_feature 1..17: note = Oligonucleotide
  source 1..17: mol_type = other DNA
ggccgccctgcgccccc

SEQ ID NO: 25973 - DNA, 17 bp, synthetic construct
  misc_feature 1..17: note = Oligonucleotide
  source 1..17: mol_type = other DNA
aagggccgccctgcgcc

SEQ ID NO: 25974 - DNA, 17 bp, synthetic construct
  misc_feature 1..17: note = Oligonucleotide
  source 1..17: mol_type = other DNA
ccgaagggccgccctgc

SEQ ID NO: 25975 - DNA, 17 bp, synthetic construct
  misc_feature 1..17: note = Oligonucleotide
  source 1..17: mol_type = other DNA
aggccgaagggccgccc

SEQ ID NO: 25976 - DNA, 17 bp, synthetic construct
  misc_feature 1..17: note = Oligonucleotide
  source 1..17: mol_type = other DNA
gtgaggccgaagggccg

SEQ ID NO: 25977 - DNA, 17 bp, synthetic construct
  misc_feature 1..17: note = Oligonucleotide
  source 1..17: mol_type = other DNA
ggcgtgaggccgaaggg

SEQ ID NO: 25978 - DNA, 17 bp, synthetic construct
  misc_feature 1..17: note = Oligonucleotide
  source 1..17: mol_type = other DNA
gggggcgtgaggccgaa

SEQ ID NO: 25979 - DNA, 17 bp, synthetic construct
  misc_feature 1..17: note = Oligonucleotide
  source 1..17: mol_type = other DNA
gtggggggcgtgaggcc

SEQ ID NO: 25980 - DNA, 17 bp, synthetic construct
  misc_feature 1..17: note = Oligonucleotide
  source 1..17: mol_type = other DNA
atggtggggggcgtgag

SEQ ID NO: 25981 - DNA, 17 bp, synthetic construct
  misc_feature 1..17: note = Oligonucleotide
  source 1..17: mol_type = other DNA
aggatggtggggggcgt

SEQ ID NO: 25982 - DNA, 17 bp, synthetic construct
  misc_feature 1..17: note = Oligonucleotide
  source 1..17: mol_type = other DNA
ttgaggatggtgggggg

SEQ ID NO: 25983 - DNA, 17 bp, synthetic construct
  misc_feature 1..17: note = Oligonucleotide
  source 1..17: mol_type = other DNA
gacttgaggatggtggg

SEQ ID NO: 25984 - DNA, 17 bp, synthetic construct
  misc_feature 1..17: note = Oligonucleotide
  source 1..17: mol_type = other DNA
gacgacttgaggatggt

SEQ ID NO: 25985 - DNA, 17 bp, synthetic construct
  misc_feature 1..17: note = Oligonucleotide
  source 1..17: mol_type = other DNA
ctggacgacttgaggat

SEQ ID NO: 25986 - DNA, 17 bp, synthetic construct
  misc_feature 1..17: note = Oligonucleotide
  source 1..17: mol_type = other DNA
aggctggacgacttgag

SEQ ID NO: 25987 - DNA, 17 bp, synthetic construct
  misc_feature 1..17: note = Oligonucleotide
  source 1..17: mol_type = other DNA
gagaggctggacgactt

SEQ ID NO: 25988 - DNA, 17 bp, synthetic construct
  misc_feature 1..17: note = Oligonucleotide
  source 1..17: mol_type = other DNA
atggagaggctggacga

SEQ ID NO: 25989 - DNA, 17 bp, synthetic construct
  misc_feature 1..17: note = Oligonucleotide
  source 1..17: mol_type = other DNA
gggatggagaggctgga

SEQ ID NO: 25990 - DNA, 17 bp, synthetic construct
  misc_feature 1..17: note = Oligonucleotide
  source 1..17: mol_type = other DNA
tgcgggatggagaggct

SEQ ID NO: 25991 - DNA, 17 bp, synthetic construct
  misc_feature 1..17: note = Oligonucleotide
  source 1..17: mol_type = other DNA
tcgtgcgggatggagag

SEQ ID NO: 25992 - DNA, 17 bp, synthetic construct
  misc_feature 1..17: note = Oligonucleotide
  source 1..17: mol_type = other DNA
ggctcgtgcgggatgga

SEQ ID NO: 25993 - DNA, 17 bp, synthetic construct
  misc_feature 1..17: note = Oligonucleotide
  source 1..17: mol_type = other DNA
ttgggctcgtgcgggat

SEQ ID NO: 25994 - DNA, 17 bp, synthetic construct
  misc_feature 1..17: note = Oligonucleotide
  source 1..17: mol_type = other DNA
tccttgggctcgtgcgg

SEQ ID NO: 25995 - DNA, 17 bp, synthetic construct
  misc_feature 1..17: note = Oligonucleotide
  source 1..17: mol_type = other DNA
acctccttgggctcgtg

SEQ ID NO: 25996 - DNA, 17 bp, synthetic construct
  misc_feature 1..17: note = Oligonucleotide
  source 1..17: mol_type = other DNA
cgcacctccttgggctc

SEQ ID NO: 25997 - DNA, 17 bp, synthetic construct
  misc_feature 1..17: note = Oligonucleotide
  source 1..17: mol_type = other DNA
aagcgcacctccttggg

SEQ ID NO: 25998 - DNA, 17 bp, synthetic construct
  misc_feature 1..17: note = Oligonucleotide
  source 1..17: mol_type = other DNA
acgaagcgcacctcctt

SEQ ID NO: 25999 - DNA, 17 bp, synthetic construct
  misc_feature 1..17: note = Oligonucleotide
  source 1..17: mol_type = other DNA
accacgaagcgcacctc

SEQ ID NO: 26000 - DNA, 17 bp, synthetic construct
  misc_feature 1..17: note = Oligonucleotide
  source 1..17: mol_type = other DNA
cgcaccacgaagcgcac

SEQ ID NO: 26001 - DNA, 17 bp, synthetic construct
  misc_feature 1..17: note = Oligonucleotide
  source 1..17: mol_type = other DNA
ctgcgcaccacgaagcg

SEQ ID NO: 26002 - DNA, 17 bp, synthetic construct
  misc_feature 1..17: note = Oligonucleotide
  source 1..17: mol_type = other DNA
acgctgcgcaccacgaa

SEQ ID NO: 26003 - DNA, 17 bp, synthetic construct
  misc_feature 1..17: note = Oligonucleotide
  source 1..17: mol_type = other DNA
ctcacgctgcgcaccac

SEQ ID NO: 26004 - DNA, 17 bp, synthetic construct
  misc_feature 1..17: note = Oligonucleotide
  source 1..17: mol_type = other DNA
gcgctcacgctgcgcac

SEQ ID NO: 26005 - DNA, 17 bp, synthetic construct
  misc_feature 1..17: note = Oligonucleotide
  source 1..17: mol_type = other DNA
cgcgcgctcacgctgcg

SEQ ID NO: 26006 - DNA, 17 bp, synthetic construct
  misc_feature 1..17: note = Oligonucleotide
  source 1..17: mol_type = other DNA
ctgcgcgcgctcacgct

SEQ ID NO: 26007 - DNA, 17 bp, synthetic construct
  misc_feature 1..17: note = Oligonucleotide
  source 1..17: mol_type = other DNA
cgactgcgcgcgctcac

SEQ ID NO: 26008 - DNA, 17 bp, synthetic construct
  misc_feature 1..17: note = Oligonucleotide
  source 1..17: mol_type = other DNA
gagcgactgcgcgcgct

SEQ ID NO: 26009 - DNA, 17 bp, synthetic construct
  misc_feature 1..17: note = Oligonucleotide
  source 1..17: mol_type = other DNA
ggggagcgactgcgcgc

SEQ ID NO: 26010 - DNA, 17 bp, synthetic construct
  misc_feature 1..17: note = Oligonucleotide
  source 1..17: mol_type = other DNA
gagggggagcgactgcg

SEQ ID NO: 26011 - DNA, 17 bp, synthetic construct
  misc_feature 1..17: note = Oligonucleotide
  source 1..17: mol_type = other DNA
ggcgagggggagcgact

SEQ ID NO: 26012 - DNA, 17 bp, synthetic construct
  misc_feature 1..17: note = Oligonucleotide
  source 1..17: mol_type = other DNA
gacggcgagggggagcg

SEQ ID NO: 26013 - DNA, 17 bp, synthetic construct
  misc_feature 1..17: note = Oligonucleotide
  source 1..17: mol_type = other DNA
ggcgacggcgaggggga

SEQ ID NO: 26014 - DNA, 17 bp, synthetic construct
  misc_feature 1..17: note = Oligonucleotide
  source 1..17: mol_type = other DNA
agcggcgacggcgaggg

SEQ ID NO: 26015 - DNA, 17 bp, synthetic construct
  misc_feature 1..17: note = Oligonucleotide
  source 1..17: mol_type = other DNA
ggcagcggcgacggcga

SEQ ID NO: 26016 - DNA, 17 bp, synthetic construct
  misc_feature 1..17: note = Oligonucleotide
  source 1..17: mol_type = other DNA
gagggcagcggcgacgg

SEQ ID NO: 26017 - DNA, 17 bp, synthetic construct
  misc_feature 1..17: note = Oligonucleotide
  source 1..17: mol_type = other DNA
ggcgagggcagcggcga

SEQ ID NO: 26018 - DNA, 17 bp, synthetic construct
  misc_feature 1..17: note = Oligonucleotide
  source 1..17: mol_type = other DNA
gcgggcgagggcagcgg

SEQ ID NO: 26019 - DNA, 17 bp, synthetic construct
  misc_feature 1..17: note = Oligonucleotide
  source 1..17: mol_type = other DNA
gacgcgggcgagggcag

SEQ ID NO: 26020 - DNA, 17 bp, synthetic construct
  misc_feature 1..17: note = Oligonucleotide
  source 1..17: mol_type = other DNA
ccggacgcgggcgaggg

SEQ ID NO: 26021 - DNA, 17 bp, synthetic construct
  misc_feature 1..17: note = Oligonucleotide
  source 1..17: mol_type = other DNA
gggccggacgcgggcga

SEQ ID NO: 26022 - DNA, 17 bp, synthetic construct
  misc_feature 1..17: note = Oligonucleotide
  source 1..17: mol_type = other DNA
ccggggccggacgcggg

SEQ ID NO: 26023 - DNA, 17 bp, synthetic construct
  misc_feature 1..17: note = Oligonucleotide
  source 1..17: mol_type = other DNA
gggccggggccggacgc

SEQ ID NO: 26024 - DNA, 17 bp, synthetic construct
  misc_feature 1..17: note = Oligonucleotide
  source 1..17: mol_type = other DNA
ccggggccggggccgga

SEQ ID NO: 26025 - DNA, 17 bp, synthetic construct
  misc_feature 1..17: note = Oligonucleotide
  source 1..17: mol_type = other DNA
gcgccggggccggggcc

SEQ ID NO: 26026 - DNA, 17 bp, synthetic construct
  misc_feature 1..17: note = Oligonucleotide
  source 1..17: mol_type = other DNA
ggggcgccggggccggg

SEQ ID NO: 26027 - DNA, 17 bp, synthetic construct
  misc_feature 1..17: note = Oligonucleotide
  source 1..17: mol_type = other DNA
ccgggggcgccggggcc

SEQ ID NO: 26028 - DNA, 17 bp, synthetic construct
  misc_feature 1..17: note = Oligonucleotide
  source 1..17: mol_type = other DNA
gggccgggggcgccggg

SEQ ID NO: 26029 - DNA, 17 bp, synthetic construct
  misc_feature 1..17: note = Oligonucleotide
  source 1..17: mol_type = other DNA
cgtgggccgggggcgcc

SEQ ID NO: 26030 - DNA, 17 bp, synthetic construct
  misc_feature 1..17: note = Oligonucleotide
  source 1..17: mol_type = other DNA
cggcgtgggccgggggc

SEQ ID NO: 26031 - DNA, 17 bp, synthetic construct
  misc_feature 1..17: note = Oligonucleotide
  source 1..17: mol_type = other DNA
ggtcggcgtgggccggg

SEQ ID NO: 26032 - DNA, 17 bp, synthetic construct
  misc_feature 1..17: note = Oligonucleotide
  source 1..17: mol_type = other DNA
aagggtcggcgtgggcc

SEQ ID NO: 26033 - DNA, 17 bp, synthetic construct
  misc_feature 1..17: note = Oligonucleotide
  source 1..17: mol_type = other DNA
tggaagggtcggcgtgg

SEQ ID NO: 26034 - DNA, 17 bp, synthetic construct
  misc_feature 1..17: note = Oligonucleotide
  source 1..17: mol_type = other DNA
tgctggaagggtcggcg

SEQ ID NO: 26035 - DNA, 17 bp, synthetic construct
  misc_feature 1..17: note = Oligonucleotide
  source 1..17: mol_type = other DNA
ttctgctggaagggtcg

SEQ ID NO: 26036 - DNA, 17 bp, synthetic construct
  misc_feature 1..17: note = Oligonucleotide
  source 1..17: mol_type = other DNA
ggcttctgctggaaggg

SEQ ID NO: 26037 - DNA, 17 bp, synthetic construct
  misc_feature 1..17: note = Oligonucleotide
  source 1..17: mol_type = other DNA
agcggcttctgctggaa

SEQ ID NO: 26038 - DNA, 17 bp, synthetic construct
  misc_feature 1..17: note = Oligonucleotide
  source 1..17: mol_type = other DNA
tgcagcggcttctgctg

SEQ ID NO: 26039 - DNA, 17 bp, synthetic construct
  misc_feature 1..17: note = Oligonucleotide
  source 1..17: mol_type = other DNA
agctgcagcggcttctg

SEQ ID NO: 26040 - DNA, 17 bp, synthetic construct
  misc_feature 1..17: note = Oligonucleotide
  source 1..17: mol_type = other DNA
cagagctgcagcggctt

SEQ ID NO: 26041 - DNA, 17 bp, synthetic construct
  misc_feature 1..17: note = Oligonucleotide
  source 1..17: mol_type = other DNA
ctccagagctgcagcgg

SEQ ID NO: 26042 - DNA, 17 bp, synthetic construct
  misc_feature 1..17: note = Oligonucleotide
  source 1..17: mol_type = other DNA
ttgctccagagctgcag

SEQ ID NO: 26043 - DNA, 17 bp, synthetic construct
  misc_feature 1..17: note = Oligonucleotide
  source 1..17: mol_type = other DNA
aacttgctccagagctg

SEQ ID NO: 26044 - DNA, 17 bp, synthetic construct
  misc_feature 1..17: note = Oligonucleotide
  source 1..17: mol_type = other DNA
tcgaacttgctccagag

SEQ ID NO: 26045 - DNA, 17 bp, synthetic construct
  misc_feature 1..17: note = Oligonucleotide
  source 1..17: mol_type = other DNA
acgtcgaacttgctcca

SEQ ID NO: 26046 - DNA, 17 bp, synthetic construct
  misc_feature 1..17: note = Oligonucleotide
  source 1..17: mol_type = other DNA
cccacgtcgaacttgct

SEQ ID NO: 26047 - DNA, 17 bp, synthetic construct
  misc_feature 1..17: note = Oligonucleotide
  source 1..17: mol_type = other DNA
tcgcccacgtcgaactt

SEQ ID NO: 26048 - DNA, 17 bp, synthetic construct
  misc_feature 1..17: note = Oligonucleotide
  source 1..17: mol_type = other DNA
cagtcgcccacgtcgaa

SEQ ID NO: 26049 - DNA, 17 bp, synthetic construct
  misc_feature 1..17: note = Oligonucleotide
  source 1..17: mol_type = other DNA
agccagtcgcccacgtc

SEQ ID NO: 26050 - DNA, 17 bp, synthetic construct
  misc_feature 1..17: note = Oligonucleotide
  source 1..17: mol_type = other DNA
tccagccagtcgcccac

SEQ ID NO: 26051 - DNA, 17 bp, synthetic construct
  misc_feature 1..17: note = Oligonucleotide
  source 1..17: mol_type = other DNA
ctctccagccagtcgcc

SEQ ID NO: 26052 - DNA, 17 bp, synthetic construct
  misc_feature 1..17: note = Oligonucleotide
  source 1..17: mol_type = other DNA
atgctctccagccagtc

SEQ ID NO: 26053 - DNA, 17 bp, synthetic construct
  misc_feature 1..17: note = Oligonucleotide
  source 1..17: mol_type = other DNA
tggatgctctccagcca

SEQ ID NO: 26054 - DNA, 17 bp, synthetic construct
  misc_feature 1..17: note = Oligonucleotide
  source 1..17: mol_type = other DNA
aggtggatgctctccag

SEQ ID NO: 26055 - DNA, 17 bp, synthetic construct
  misc_feature 1..17: note = Oligonucleotide
  source 1..17: mol_type = other DNA
cctaggtggatgctctc

SEQ ID NO: 26056 - DNA, 17 bp, synthetic construct
  misc_feature 1..17: note = Oligonucleotide
  source 1..17: mol_type = other DNA
tcgcctaggtggatgct

SEQ ID NO: 26057 - DNA, 17 bp, synthetic construct
  misc_feature 1..17: note = Oligonucleotide
  source 1..17: mol_type = other DNA
tgctcgcctaggtggat

SEQ ID NO: 26058 - DNA, 17 bp, synthetic construct
  misc_feature 1..17: note = Oligonucleotide
  source 1..17: mol_type = other DNA
cggtgctcgcctaggtg

SEQ ID NO: 26059 - DNA, 17 bp, synthetic construct
  misc_feature 1..17: note = Oligonucleotide
  source 1..17: mol_type = other DNA
tcgcggtgctcgcctag

SEQ ID NO: 26060 - DNA, 17 bp, synthetic construct
  misc_feature 1..17: note = Oligonucleotide
  source 1..17: mol_type = other DNA
cggtcgcggtgctcgcc

SEQ ID NO: 26061 - DNA, 17 bp, synthetic construct
  misc_feature 1..17: note = Oligonucleotide
  source 1..17: mol_type = other DNA
aagcggtcgcggtgctc

SEQ ID NO: 26062 - DNA, 17 bp, synthetic construct
  misc_feature 1..17: note = Oligonucleotide
  source 1..17: mol_type = other DNA
tcgaagcggtcgcggtg

SEQ ID NO: 26063 - DNA, 17 bp, synthetic construct
  misc_feature 1..17: note = Oligonucleotide
  source 1..17: mol_type = other DNA
tcctcgaagcggtcgcg

SEQ ID NO: 26064 - DNA, 17 bp, synthetic construct
  misc_feature 1..17: note = Oligonucleotide
  source 1..17: mol_type = other DNA
tggtcctcgaagcggtc

SEQ ID NO: 26065 - DNA, 17 bp, synthetic construct
  misc_feature 1..17: note = Oligonucleotide
  source 1..17: mol_type = other DNA
tcatggtcctcgaagcg

SEQ ID NO: 26066 - DNA, 17 bp, synthetic construct
  misc_feature 1..17: note = Oligonucleotide
  source 1..17: mol_type = other DNA
atctcatggtcctcgaa

SEQ ID NO: 26067 - DNA, 17 bp, synthetic construct
  misc_feature 1..17: note = Oligonucleotide
  source 1..17: mol_type = other DNA
tctatctcatggtcctc

SEQ ID NO: 26068 - DNA, 17 bp, synthetic construct
  misc_feature 1..17: note = Oligonucleotide
  source 1..17: mol_type = other DNA
ccttctatctcatggtc

SEQ ID NO: 26069 - DNA, 17 bp, synthetic construct
  misc_feature 1..17: note = Oligonucleotide
  source 1..17: mol_type = other DNA
gcgccttctatctcatg

SEQ ID NO: 26070 - DNA, 17 bp, synthetic construct
  misc_feature 1..17: note = Oligonucleotide
  source 1..17: mol_type = other DNA
tgcgcgccttctatctc

SEQ ID NO: 26071 - DNA, 17 bp, synthetic construct
  misc_feature 1..17: note = Oligonucleotide
  source 1..17: mol_type = other DNA
aggtgcgcgccttctat

SEQ ID NO: 26072 - DNA, 17 bp, synthetic construct
  misc_feature 1..17: note = Oligonucleotide
  source 1..17: mol_type = other DNA
ggtaggtgcgcgccttc

SEQ ID NO: 26073 - DNA, 17 bp, synthetic construct
  misc_feature 1..17: note = Oligonucleotide
  source 1..17: mol_type = other DNA
gcgggtaggtgcgcgcc

SEQ ID NO: 26074 - DNA, 17 bp, synthetic construct
  misc_feature 1..17: note = Oligonucleotide
  source 1..17: mol_type = other DNA
agcgcgggtaggtgcgc

SEQ ID NO: 26075 - DNA, 17 bp, synthetic construct
  misc_feature 1..17: note = Oligonucleotide
  source 1..17: mol_type = other DNA
gtaagcgcgggtaggtg

SEQ ID NO: 26076 - DNA, 17 bp, synthetic construct
  misc_feature 1..17: note = Oligonucleotide
  source 1..17: mol_type = other DNA
ttggtaagcgcgggtag

SEQ ID NO: 26077 - DNA, 17 bp, synthetic construct
  misc_feature 1..17: note = Oligonucleotide
  source 1..17: mol_type = other DNA
tccttggtaagcgcggg

SEQ ID NO: 26078 - DNA, 17 bp, synthetic construct
  misc_feature 1..17: note = Oligonucleotide
  source 1..17: mol_type = other DNA
tcgtccttggtaagcgc

SEQ ID NO: 26079 - DNA, 17 bp, synthetic construct
  misc_feature 1..17: note = Oligonucleotide
  source 1..17: mol_type = other DNA
aagtcgtccttggtaag

SEQ ID NO: 26080 - DNA, 17 bp, synthetic construct
  misc_feature 1..17: note = Oligonucleotide
  source 1..17: mol_type = other DNA
acgaagtcgtccttggt

SEQ ID NO: 26081 - DNA, 17 bp, synthetic construct
  misc_feature 1..17: note = Oligonucleotide
  source 1..17: mol_type = other DNA
tccacgaagtcgtcctt

SEQ ID NO: 26082 - DNA, 17 bp, synthetic construct
  misc_feature 1..17: note = Oligonucleotide
  source 1..17: mol_type = other DNA
agctccacgaagtcgtc

SEQ ID NO: 26083 - DNA, 17 bp, synthetic construct
  misc_feature 1..17: note = Oligonucleotide
  source 1..17: mol_type = other DNA
cccagctccacgaagtc

SEQ ID NO: 26084 - DNA, 17 bp, synthetic construct
  misc_feature 1..17: note = Oligonucleotide
  source 1..17: mol_type = other DNA
acgcccagctccacgaa

SEQ ID NO: 26085 - DNA, 17 bp, synthetic construct
  misc_feature 1..17: note = Oligonucleotide
  source 1..17: mol_type = other DNA
gtgacgcccagctccac

SEQ ID NO: 26086 - DNA, 17 bp, synthetic construct
  misc_feature 1..17: note = Oligonucleotide
  source 1..17: mol_type = other DNA
cgcgtgacgcccagctc

SEQ ID NO: 26087 - DNA, 17 bp, synthetic construct
  misc_feature 1..17: note = Oligonucleotide
  source 1..17: mol_type = other DNA
acgcgcgtgacgcccag

SEQ ID NO: 26088 - DNA, 17 bp, synthetic construct
  misc_feature 1..17: note = Oligonucleotide
  source 1..17: mol_type = other DNA
cccacgcgcgtgacgcc

SEQ ID NO: 26089 - DNA, 17 bp, synthetic construct
  misc_feature 1..17: note = Oligonucleotide
  source 1..17: mol_type = other DNA
tggcccacgcgcgtgac

SEQ ID NO: 26090 - DNA, 17 bp, synthetic construct
  misc_feature 1..17: note = Oligonucleotide
  source 1..17: mol_type = other DNA
cggtggcccacgcgcgt

SEQ ID NO: 26091 - DNA, 17 bp, synthetic construct
  misc_feature 1..17: note = Oligonucleotide
  source 1..17: mol_type = other DNA
atgcggtggcccacgcg

SEQ ID NO: 26092 - DNA, 17 bp, synthetic construct
  misc_feature 1..17: note = Oligonucleotide
  source 1..17: mol_type = other DNA
ttcatgcggtggcccac

SEQ ID NO: 26093 - DNA, 17 bp, synthetic construct
  misc_feature 1..17: note = Oligonucleotide
  source 1..17: mol_type = other DNA
atgttcatgcggtggcc

SEQ ID NO: 26094 - DNA, 17 bp, synthetic construct
  misc_feature 1..17: note = Oligonucleotide
  source 1..17: mol_type = other DNA
tcgatgttcatgcggtg

SEQ ID NO: 26095 - DNA, 17 bp, synthetic construct
  misc_feature 1..17: note = Oligonucleotide
  source 1..17: mol_type = other DNA
cgctcgatgttcatgcg

SEQ ID NO: 26096 - DNA, 17 bp, synthetic construct
  misc_feature 1..17: note = Oligonucleotide
  source 1..17: mol_type = other DNA
gcgcgctcgatgttcat

SEQ ID NO: 26097 - DNA, 17 bp, synthetic construct
  misc_feature 1..17: note = Oligonucleotide
  source 1..17: mol_type = other DNA
agcgcgcgctcgatgtt

SEQ ID NO: 26098 - DNA, 17 bp, synthetic construct
  misc_feature 1..17: note = Oligonucleotide
  source 1..17: mol_type = other DNA
ctgagcgcgcgctcgat

SEQ ID NO: 26099 - DNA, 17 bp, synthetic construct
  misc_feature 1..17: note = Oligonucleotide
  source 1..17: mol_type = other DNA
tgcctgagcgcgcgctc

SEQ ID NO: 26100 - DNA, 17 bp, synthetic construct
  misc_feature 1..17: note = Oligonucleotide
  source 1..17: mol_type = other DNA
agctgcctgagcgcgcg

SEQ ID NO: 26101 - DNA, 17 bp, synthetic construct
  misc_feature 1..17: note = Oligonucleotide
  source 1..17: mol_type = other DNA
tccagctgcctgagcgc

SEQ ID NO: 26102 - DNA, 17 bp, synthetic construct
  misc_feature 1..17: note = Oligonucleotide
  source 1..17: mol_type = other DNA
ccgtccagctgcctgag

SEQ ID NO: 26103 - DNA, 17 bp, synthetic construct
  misc_feature 1..17: note = Oligonucleotide
  source 1..17: mol_type = other DNA
ctgccgtccagctgcct

SEQ ID NO: 26104 - DNA, 17 bp, synthetic construct
  misc_feature 1..17: note = Oligonucleotide
  source 1..17: mol_type = other DNA
cagctgccgtccagctg

SEQ ID NO: 26105 - DNA, 17 bp, synthetic construct
  misc_feature 1..17: note = Oligonucleotide
  source 1..17: mol_type = other DNA
cgtcagctgccgtccag

SEQ ID NO: 26106 - DNA, 17 bp, synthetic construct
  misc_feature 1..17: note = Oligonucleotide
  source 1..17: mol_type = other DNA
gggcgtcagctgccgtc

SEQ ID NO: 26107 - DNA, 17 bp, synthetic construct
  misc_feature 1..17: note = Oligonucleotide
  source 1..17: mol_type = other DNA
gtggggcgtcagctgcc

SEQ ID NO: 26108 - DNA, 17 bp, synthetic construct
  misc_feature 1..17: note = Oligonucleotide
  source 1..17: mol_type = other DNA
ggggtggggcgtcagct

SEQ ID NO: 26109 - DNA, 17 bp, synthetic construct
  misc_feature 1..17: note = Oligonucleotide
  source 1..17: mol_type = other DNA
gtgggggtggggcgtca

SEQ ID NO: 26110 - DNA, 25 bp, synthetic construct
  misc_feature 1..25: note = Oligonucleotide
  source 1..25: mol_type = other DNA
gccgggcccagggcggcggggctca

SEQ ID NO: 26111 - DNA, 25 bp, synthetic construct
  misc_feature 1..25: note = Oligonucleotide
  source 1..25: mol_type = other DNA
acggccgggcccagggcggcggggc

SEQ ID NO: 26112 - DNA, 25 bp, synthetic construct
  misc_feature 1..25: note = Oligonucleotide
  source 1..25: mol_type = other DNA
ggcacggccgggcccagggcggcgg

SEQ ID NO: 26113 - DNA, 25 bp, synthetic construct
  misc_feature 1..25: note = Oligonucleotide
  source 1..25: mol_type = other DNA
aggggcacggccgggcccagggcgg

SEQ ID NO: 26114 - DNA, 25 bp, synthetic construct
  misc_feature 1..25: note = Oligonucleotide
  source 1..25: mol_type = other DNA
cgcaggggcacggccgggcccaggg

SEQ ID NO: 26115 - DNA, 25 bp, synthetic construct
  misc_feature 1..25: note = Oligonucleotide
  source 1..25: mol_type = other DNA
gagcgcaggggcacggccgggccca

SEQ ID NO: 26116 - DNA, 25 bp, synthetic construct
  misc_feature 1..25: note = Oligonucleotide
  source 1..25: mol_type = other DNA
ggggagcgcaggggcacggccgggc

SEQ ID NO: 26117 - DNA, 25 bp, synthetic construct
  misc_feature 1..25: note = Oligonucleotide
  source 1..25: mol_type = other DNA
ggcggggagcgcaggggcacggccg

SEQ ID NO: 26118 - DNA, 25 bp, synthetic construct
  misc_feature 1..25: note = Oligonucleotide
  source 1..25: mol_type = other DNA
ccgggcggggagcgcaggggcacgg

SEQ ID NO: 26119 - DNA, 25 bp, synthetic construct
  misc_feature 1..25: note = Oligonucleotide
  source 1..25: mol_type = other DNA
atcccgggcggggagcgcaggggca

SEQ ID NO: 26120 - DNA, 25 bp, synthetic construct
  misc_feature 1..25: note = Oligonucleotide
  source 1..25: mol_type = other DNA
ggaatcccgggcggggagcgcaggg

SEQ ID NO: 26121 - DNA, 25 bp, synthetic construct
  misc_feature 1..25: note = Oligonucleotide
  source 1..25: mol_type = other DNA
gggggaatcccgggcggggagcgca

SEQ ID NO: 26122 - DNA, 25 bp, synthetic construct
  misc_feature 1..25: note = Oligonucleotide
  source 1..25: mol_type = other DNA
ggtgggggaatcccgggcggggagc

SEQ ID NO: 26123 - DNA, 25 bp, synthetic construct
  misc_feature 1..25: note = Oligonucleotide
  source 1..25: mol_type = other DNA
gggggtgggggaatcccgggcgggg

SEQ ID NO: 26124 - DNA, 25 bp, synthetic construct
  misc_feature 1..25: note = Oligonucleotide
  source 1..25: mol_type = other DNA
ggcgggggtgggggaatcccgggcg

SEQ ID NO: 26125 - DNA, 25 bp, synthetic construct
  misc_feature 1..25: note = Oligonucleotide
  source 1..25: mol_type = other DNA
cccggcgggggtgggggaatcccgg

SEQ ID NO: 26126 - DNA, 25 bp, synthetic construct
  misc_feature 1..25: note = Oligonucleotide
  source 1..25: mol_type = other DNA
gcgcccggcgggggtgggggaatcc

SEQ ID NO: 26127 - DNA, 25 bp, synthetic construct
  misc_feature 1..25: note = Oligonucleotide
  source 1..25: mol_type = other DNA
ggcgcgcccggcgggggtgggggaa

SEQ ID NO: 26128 - DNA, 25 bp, synthetic construct
  misc_feature 1..25: note = Oligonucleotide
  source 1..25: mol_type = other DNA
ccgggcgcgcccggcgggggtgggg

SEQ ID NO: 26129 - DNA, 25 bp, synthetic construct
  misc_feature 1..25: note = Oligonucleotide
  source 1..25: mol_type = other DNA
gcgccgggcgcgcccggcgggggtg

SEQ ID NO: 26130 - DNA, 25 bp, synthetic construct
  misc_feature 1..25: note = Oligonucleotide
  source 1..25: mol_type = other DNA
cgggcgccgggcgcgcccggcgggg

SEQ ID NO: 26131 - DNA, 25 bp, synthetic construct
  misc_feature 1..25: note = Oligonucleotide
  source 1..25: mol_type = other DNA
tcccgggcgccgggcgcgcccggcg

SEQ ID NO: 26132 - DNA, 25 bp, synthetic construct
  misc_feature 1..25: note = Oligonucleotide
  source 1..25: mol_type = other DNA
gggtcccgggcgccgggcgcgcccg

SEQ ID NO: 26133 - DNA, 25 bp, synthetic construct
  misc_feature 1..25: note = Oligonucleotide
  source 1..25: mol_type = other DNA
cgggggtcccgggcgccgggcgcgc

SEQ ID NO: 26134 - DNA, 25 bp, synthetic construct
  misc_feature 1..25: note = Oligonucleotide
  source 1..25: mol_type = other DNA
ggccgggggtcccgggcgccgggcg

SEQ ID NO: 26135 - DNA, 25 bp, synthetic construct
  misc_feature 1..25: note = Oligonucleotide
  source 1..25: mol_type = other DNA
gtgggccgggggtcccgggcgccgg

SEQ ID NO: 26136 - DNA, 25 bp, synthetic construct
  misc_feature 1..25: note = Oligonucleotide
  source 1..25: mol_type = other DNA
gccgtgggccgggggtcccgggcgc

SEQ ID NO: 26137 - DNA, 25 bp, synthetic construct
  misc_feature 1..25: note = Oligonucleotide
  source 1..25: mol_type = other DNA
gtagccgtgggccgggggtcccggg

SEQ ID NO: 26138 - DNA, 25 bp, synthetic construct
  misc_feature 1..25: note = Oligonucleotide
  source 1..25: mol_type = other DNA
tgagtagccgtgggccgggggtccc

SEQ ID NO: 26139 - DNA, 25 bp, synthetic construct
  misc_feature 1..25: note = Oligonucleotide
  source 1..25: mol_type = other DNA
gggtgagtagccgtgggccgggggt

SEQ ID NO: 26140 - DNA, 25 bp, synthetic construct
  misc_feature 1..25: note = Oligonucleotide
  source 1..25: mol_type = other DNA
gaggggtgagtagccgtgggccggg

SEQ ID NO: 26141 - DNA, 25 bp, synthetic construct
  misc_feature 1..25: note = Oligonucleotide
  source 1..25: mol_type = other DNA
ggggaggggtgagtagccgtgggcc

SEQ ID NO: 26142 - DNA, 25 bp, synthetic construct
  misc_feature 1..25: note = Oligonucleotide
  source 1..25: mol_type = other DNA
gcgggggaggggtgagtagccgtgg

SEQ ID NO: 26143 - DNA, 25 bp, synthetic construct
  misc_feature 1..25: note = Oligonucleotide
  source 1..25: mol_type = other DNA
gcggcgggggaggggtgagtagccg

SEQ ID NO: 26144 - DNA, 25 bp, synthetic construct
  misc_feature 1..25: note = Oligonucleotide
  source 1..25: mol_type = other DNA
gaggcggcgggggaggggtgagtag

SEQ ID NO: 26145 - DNA, 25 bp, synthetic construct
  misc_feature 1..25: note = Oligonucleotide
  source 1..25: mol_type = other DNA
gcggaggcggcgggggaggggtgag

SEQ ID NO: 26146 - DNA, 25 bp, synthetic construct
  misc_feature 1..25: note = Oligonucleotide
  source 1..25: mol_type = other DNA
ccggcggaggcggcgggggaggggt

SEQ ID NO: 26147 - DNA, 25 bp, synthetic construct
  misc_feature 1..25: note = Oligonucleotide
  source 1..25: mol_type = other DNA
gtcccggcggaggcggcgggggagg

SEQ ID NO: 26148 - DNA, 25 bp, synthetic construct
  misc_feature 1..25: note = Oligonucleotide
  source 1..25: mol_type = other DNA
agggtcccggcggaggcggcggggg

SEQ ID NO: 26149 - DNA, 25 bp, synthetic construct
  misc_feature 1..25: note = Oligonucleotide
  source 1..25: mol_type = other DNA
gggagggtcccggcggaggcggcgg

SEQ ID NO: 26150 - DNA, 25 bp, synthetic construct
  misc_feature 1..25: note = Oligonucleotide
  source 1..25: mol_type = other DNA
atggggagggtcccggcggaggcgg

SEQ ID NO: 26151 - DNA, 25 bp, synthetic construct
  misc_feature 1..25: note = Oligonucleotide
  source 1..25: mol_type = other DNA
gcgatggggagggtcccggcggagg

SEQ ID NO: 26152 - DNA, 25 bp, synthetic construct
  misc_feature 1..25: note = Oligonucleotide
  source 1..25: mol_type = other DNA
ctggcgatggggagggtcccggcgg

SEQ ID NO: 26153 - DNA, 25 bp, synthetic construct
  misc_feature 1..25: note = Oligonucleotide
  source 1..25: mol_type = other DNA
gccctggcgatggggagggtcccgg

SEQ ID NO: 26154 - DNA, 25 bp, synthetic construct
  misc_feature 1..25: note = Oligonucleotide
  source 1..25: mol_type = other DNA
cccgccctggcgatggggagggtcc

SEQ ID NO: 26155 - DNA, 25 bp, synthetic construct
  misc_feature 1..25: note = Oligonucleotide
  source 1..25: mol_type = other DNA
ggccccgccctggcgatggggaggg

SEQ ID NO: 26156 - DNA, 25 bp, synthetic construct
  misc_feature 1..25: note = Oligonucleotide
  source 1..25: mol_type = other DNA
cggggccccgccctggcgatgggga

SEQ ID NO: 26157 - DNA, 25 bp, synthetic construct
  misc_feature 1..25: note = Oligonucleotide
  source 1..25: mol_type = other DNA
tcccggggccccgccctggcgatgg

SEQ ID NO: 26158 - DNA, 25 bp, synthetic construct
  misc_feature 1..25: note = Oligonucleotide
  source 1..25: mol_type = other DNA
gcttcccggggccccgccctggcga

SEQ ID NO: 26159 - DNA, 25 bp, synthetic construct
  misc_feature 1..25: note = Oligonucleotide
  source 1..25: mol_type = other DNA
cgggcttcccggggccccgccctgg

SEQ ID NO: 26160 - DNA, 25 bp, synthetic construct
  misc_feature 1..25: note = Oligonucleotide
  source 1..25: mol_type = other DNA
ggccgggcttcccggggccccgccc

SEQ ID NO: 26161 - DNA, 25 bp, synthetic construct
  misc_feature 1..25: note = Oligonucleotide
  source 1..25: mol_type = other DNA
aggggccgggcttcccggggccccg

SEQ ID NO: 26162 - DNA, 25 bp, synthetic construct
  misc_feature 1..25: note = Oligonucleotide
  source 1..25: mol_type = other DNA
cccaggggccgggcttcccggggcc

SEQ ID NO: 26163 - DNA, 25 bp, synthetic construct
  misc_feature 1..25: note = Oligonucleotide
  source 1..25: mol_type = other DNA
cgccccaggggccgggcttcccggg

SEQ ID NO: 26164 - DNA, 25 bp, synthetic construct
  misc_feature 1..25: note = Oligonucleotide
  source 1..25: mol_type = other DNA
ccccgccccaggggccgggcttccc

SEQ ID NO: 26165 - DNA, 25 bp, synthetic construct
  misc_feature 1..25: note = Oligonucleotide
  source 1..25: mol_type = other DNA
aagccccgccccaggggccgggctt

SEQ ID NO: 26166 - DNA, 25 bp, synthetic construct
  misc_feature 1..25: note = Oligonucleotide
  source 1..25: mol_type = other DNA
ccgaagccccgccccaggggccggg

SEQ ID NO: 26167 - DNA, 25 bp, synthetic construct
  misc_feature 1..25: note = Oligonucleotide
  source 1..25: mol_type = other DNA
cggccgaagccccgccccaggggcc

SEQ ID NO: 26168 - DNA, 25 bp, synthetic construct
  misc_feature 1..25: note = Oligonucleotide
  source 1..25: mol_type = other DNA
ccgcggccgaagccccgccccaggg

SEQ ID NO: 26169 - DNA, 25 bp, synthetic construct
  misc_feature 1..25: note = Oligonucleotide
  source 1..25: mol_type = other DNA
gaaccgcggccgaagccccgcccca

SEQ ID NO: 26170 - DNA, 25 bp, synthetic construct
  misc_feature 1..25: note = Oligonucleotide
  source 1..25: mol_type = other DNA
cgcgaaccgcggccgaagccccgcc

SEQ ID NO: 26171 - DNA, 25 bp, synthetic construct
  misc_feature 1..25: note = Oligonucleotide
  source 1..25: mol_type = other DNA
ctccgcgaaccgcggccgaagcccc

SEQ ID NO: 26172 - DNA, 25 bp, synthetic construct
  misc_feature 1..25: note = Oligonucleotide
  source 1..25: mol_type = other DNA
cctggaacaccggccgtcagtcagc

SEQ ID NO: 26173 - DNA, 25 bp, synthetic construct
  misc_feature 1..25: note = Oligonucleotide
  source 1..25: mol_type = other DNA
tcgcctggaacaccggccgtcagtc

SEQ ID NO: 26174 - DNA, 25 bp, synthetic construct
  misc_feature 1..25: note = Oligonucleotide
  source 1..25: mol_type = other DNA
ggttcgcctggaacaccggccgtca

SEQ ID NO: 26175 - DNA, 25 bp, synthetic construct
  misc_feature 1..25: note = Oligonucleotide
  source 1..25: mol_type = other DNA
tcaggttcgcctggaacaccggccg

SEQ ID NO: 26176 - DNA, 25 bp, synthetic construct
  misc_feature 1..25: note = Oligonucleotide
  source 1..25: mol_type = other DNA
tcttcaggttcgcctggaacaccgg

SEQ ID NO: 26177 - DNA, 25 bp, synthetic construct
  misc_feature 1..25: note = Oligonucleotide
  source 1..25: mol_type = other DNA
acttcttcaggttcgcctggaacac

SEQ ID NO: 26178 - DNA, 25 bp, synthetic construct
  misc_feature 1..25: note = Oligonucleotide
  source 1..25: mol_type = other DNA
tgaacttcttcaggttcgcctggaa

SEQ ID NO: 26179 - DNA, 25 bp, synthetic construct
  misc_feature 1..25: note = Oligonucleotide
  source 1..25: mol_type = other DNA
ccatgaacttcttcaggttcgcctg

SEQ ID NO: 26180 - DNA, 25 bp, synthetic construct
  misc_feature 1..25: note = Oligonucleotide
  source 1..25: mol_type = other DNA
agtccatgaacttcttcaggttcgc

SEQ ID NO: 26181 - DNA, 25 bp, synthetic construct
  misc_feature 1..25: note = Oligonucleotide
  source 1..25: mol_type = other DNA
cgtagtccatgaacttcttcaggtt

SEQ ID NO: 26182 - DNA, 25 bp, synthetic construct
  misc_feature 1..25: note = Oligonucleotide
  source 1..25: mol_type = other DNA
ggacgtagtccatgaacttcttcag

SEQ ID NO: 26183 - DNA, 25 bp, synthetic construct
  misc_feature 1..25: note = Oligonucleotide
  source 1..25: mol_type = other DNA
gctggacgtagtccatgaacttctt

SEQ ID NO: 26184 - DNA, 25 bp, synthetic construct
  misc_feature 1..25: note = Oligonucleotide
  source 1..25: mol_type = other DNA
gcagctggacgtagtccatgaactt

SEQ ID NO: 26185 - DNA, 25 bp, synthetic construct
  misc_feature 1..25: note = Oligonucleotide
  source 1..25: mol_type = other DNA
tatgcagctggacgtagtccatgaa

SEQ ID NO: 26186 - DNA, 25 bp, synthetic construct
  misc_feature 1..25: note = Oligonucleotide
  source 1..25: mol_type = other DNA
tgctatgcagctggacgtagtccat

SEQ ID NO: 26187 - DNA, 25 bp, synthetic construct
  misc_feature 1..25: note = Oligonucleotide
  source 1..25: mol_type = other DNA
ccgtgctatgcagctggacgtagtc

SEQ ID NO: 26188 - DNA, 25 bp, synthetic construct
  misc_feature 1..25: note = Oligonucleotide
  source 1..25: mol_type = other DNA
tgtccgtgctatgcagctggacgta

SEQ ID NO: 26189 - DNA, 25 bp, synthetic construct
  misc_feature 1..25: note = Oligonucleotide
  source 1..25: mol_type = other DNA
ccttgtccgtgctatgcagctggac

SEQ ID NO: 26190 - DNA, 25 bp, synthetic construct
  misc_feature 1..25: note = Oligonucleotide
  source 1..25: mol_type = other DNA
ccaccttgtccgtgctatgcagctg

SEQ ID NO: 26191 - DNA, 25 bp, synthetic construct
  misc_feature 1..25: note = Oligonucleotide
  source 1..25: mol_type = other DNA
gtgccaccttgtccgtgctatgcag

SEQ ID NO: 26192 - DNA, 25 bp, synthetic construct
  misc_feature 1..25: note = Oligonucleotide
  source 1..25: mol_type = other DNA
ggcgtgccaccttgtccgtgctatg

SEQ ID NO: 26193 - DNA, 25 bp, synthetic construct
  misc_feature 1..25: note = Oligonucleotide
  source 1..25: mol_type = other DNA
acaggcgtgccaccttgtccgtgct

SEQ ID NO: 26194 - DNA, 25 bp, synthetic construct
  misc_feature 1..25: note = Oligonucleotide
  source 1..25: mol_type = other DNA
ccaacaggcgtgccaccttgtccgt

SEQ ID NO: 26195 - DNA, 25 bp, synthetic construct
  misc_feature 1..25: note = Oligonucleotide
  source 1..25: mol_type = other DNA
tgtccaacaggcgtgccaccttgtc

SEQ ID NO: 26196 - DNA, 25 bp, synthetic construct
  misc_feature 1..25: note = Oligonucleotide
  source 1..25: mol_type = other DNA
ccttgtccaacaggcgtgccacctt

SEQ ID NO: 26197 - DNA, 25 bp, synthetic construct
  misc_feature 1..25: note = Oligonucleotide
  source 1..25: mol_type = other DNA
gccccttgtccaacaggcgtgccac

SEQ ID NO: 26198 - DNA, 25 bp, synthetic construct
  misc_feature 1..25: note = Oligonucleotide
  source 1..25: mol_type = other DNA
ccagccccttgtccaacaggcgtgc

SEQ ID NO: 26199 - DNA, 25 bp, synthetic construct
  misc_feature 1..25: note = Oligonucleotide
  source 1..25: mol_type = other DNA
ggtccagccccttgtccaacaggcg

SEQ ID NO: 26200 - DNA, 25 bp, synthetic construct
  misc_feature 1..25: note = Oligonucleotide
  source 1..25: mol_type = other DNA
tggggtccagccccttgtccaacag

SEQ ID NO: 26201 - DNA, 25 bp, synthetic construct
  misc_feature 1..25: note = Oligonucleotide
  source 1..25: mol_type = other DNA
agttggggtccagccccttgtccaa

SEQ ID NO: 26202 - DNA, 25 bp, synthetic construct
  misc_feature 1..25: note = Oligonucleotide
  source 1..25: mol_type = other DNA
ggaagttggggtccagccccttgtc

SEQ ID NO: 26203 - DNA, 25 bp, synthetic construct
  misc_feature 1..25: note = Oligonucleotide
  source 1..25: mol_type = other DNA
catggaagttggggtccagcccctt

SEQ ID NO: 26204 - DNA, 25 bp, synthetic construct
  misc_feature 1..25: note = Oligonucleotide
  source 1..25: mol_type = other DNA
ggtcatggaagttggggtccagccc

SEQ ID NO: 26205 - DNA, 25 bp, synthetic construct
  misc_feature 1..25: note = Oligonucleotide
  source 1..25: mol_type = other DNA
cagggtcatggaagttggggtccag

SEQ ID NO: 26206 - DNA, 25 bp, synthetic construct
  misc_feature 1..25: note = Oligonucleotide
  source 1..25: mol_type = other DNA
agtcagggtcatggaagttggggtc

SEQ ID NO: 26207 - DNA, 25 bp, synthetic construct
  misc_feature 1..25: note = Oligonucleotide
  source 1..25: mol_type = other DNA
ctgagtcagggtcatggaagttggg

SEQ ID NO: 26208 - DNA, 25 bp, synthetic construct
  misc_feature 1..25: note = Oligonucleotide
  source 1..25: mol_type = other DNA
ctcctgagtcagggtcatggaagtt

SEQ ID NO: 26209 - DNA, 25 bp, synthetic construct
  misc_feature 1..25: note = Oligonucleotide
  source 1..25: mol_type = other DNA
cacctcctgagtcagggtcatggaa

SEQ ID NO: 26210 - DNA, 25 bp, synthetic construct
  misc_feature 1..25: note = Oligonucleotide
  source 1..25: mol_type = other DNA
cctcacctcctgagtcagggtcatg

SEQ ID NO: 26211 - DNA, 25 bp, synthetic construct
  misc_feature 1..25: note = Oligonucleotide
  source 1..25: mol_type = other DNA
actcctcacctcctgagtcagggtc

SEQ ID NO: 26212 - DNA, 25 bp, synthetic construct
  misc_feature 1..25: note = Oligonucleotide
  source 1..25: mol_type = other DNA
tccactcctcacctcctgagtcagg

SEQ ID NO: 26213 - DNA, 25 bp, synthetic construct
  misc_feature 1..25: note = Oligonucleotide
  source 1..25: mol_type = other DNA
gactccactcctcacctcctgagtc

SEQ ID NO: 26214 - DNA, 25 bp, synthetic construct
  misc_feature 1..25: note = Oligonucleotide
  source 1..25: mol_type = other DNA
cccgactccactcctcacctcctga

SEQ ID NO: 26215 - DNA, 25 bp, synthetic construct
  misc_feature 1..25: note = Oligonucleotide
  source 1..25: mol_type = other DNA
ctccccgactccactcctcacctcc

SEQ ID NO: 26216 - DNA, 25 bp, synthetic construct
  misc_feature 1..25: note = Oligonucleotide
  source 1..25: mol_type = other DNA
cccctccccgactccactcctcacc

SEQ ID NO: 26217 - DNA, 25 bp, synthetic construct
  misc_feature 1..25: note = Oligonucleotide
  source 1..25: mol_type = other DNA
atgcccctccccgactccactcctc

SEQ ID NO: 26218 - DNA, 25 bp, synthetic construct
  misc_feature 1..25: note = Oligonucleotide
  source 1..25: mol_type = other DNA
gccatgcccctccccgactccactc

SEQ ID NO: 26219 - DNA, 25 bp, synthetic construct
  misc_feature 1..25: note = Oligonucleotide
  source 1..25: mol_type = other DNA
aaggccatgcccctccccgactcca

SEQ ID NO: 26220 - DNA, 25 bp, synthetic construct
  misc_feature 1..25: note = Oligonucleotide
  source 1..25: mol_type = other DNA
gcaaaggccatgcccctccccgact

SEQ ID NO: 26221 - DNA, 25 bp, synthetic construct
  misc_feature 1..25: note = Oligonucleotide
  source 1..25: mol_type = other DNA
cgcgcaaaggccatgcccctccccg

SEQ ID NO: 26222 - DNA, 25 bp, synthetic construct
  misc_feature 1..25: note = Oligonucleotide
  source 1..25: mol_type = other DNA
agccgcgcaaaggccatgcccctcc

SEQ ID NO: 26223 - DNA, 25 bp, synthetic construct
  misc_feature 1..25: note = Oligonucleotide
  source 1..25: mol_type = other DNA
cccagccgcgcaaaggccatgcccc

SEQ ID NO: 26224 - DNA, 25 bp, synthetic construct
  misc_feature 1..25: note = Oligonucleotide
  source 1..25: mol_type = other DNA
gctcccagccgcgcaaaggccatgc

SEQ ID NO: 26225 - DNA, 25 bp, synthetic construct
  misc_feature 1..25: note = Oligonucleotide
  source 1..25: mol_type = other DNA
caggctcccagccgcgcaaaggcca

SEQ ID NO: 26226 - DNA, 25 bp, synthetic construct
  misc_feature 1..25: note = Oligonucleotide
  source 1..25: mol_type = other DNA
ggtcaggctcccagccgcgcaaagg

SEQ ID NO: 26227 - DNA, 25 bp, synthetic construct
  misc_feature 1..25: note = Oligonucleotide
  source 1..25: mol_type = other DNA
aagggtcaggctcccagccgcgcaa

SEQ ID NO: 26228 - DNA, 25 bp, synthetic construct
  misc_feature 1..25: note = Oligonucleotide
  source 1..25: mol_type = other DNA
gataagggtcaggctcccagccgcg

SEQ ID NO: 26229 - DNA, 25 bp, synthetic construct
  misc_feature 1..25: note = Oligonucleotide
  source 1..25: mol_type = other DNA
acagataagggtcaggctcccagcc

SEQ ID NO: 26230 - DNA, 25 bp, synthetic construct
  misc_feature 1..25: note = Oligonucleotide
  source 1..25: mol_type = other DNA
cagacagataagggtcaggctccca

SEQ ID NO: 26231 - DNA, 25 bp, synthetic construct
  misc_feature 1..25: note = Oligonucleotide
  source 1..25: mol_type = other DNA
tcacagacagataagggtcaggctc

SEQ ID NO: 26232 - DNA, 25 bp, synthetic construct
  misc_feature 1..25: note = Oligonucleotide
  source 1..25: mol_type = other DNA
ggttcacagacagataagggtcagg

SEQ ID NO: 26233 - DNA, 25 bp, synthetic construct
  misc_feature 1..25: note = Oligonucleotide
  source 1..25: mol_type = other DNA
ctgggttcacagacagataagggtc

SEQ ID NO: 26234 - DNA, 25 bp, synthetic construct
  misc_feature 1..25: note = Oligonucleotide
  source 1..25: mol_type = other DNA
actctgggttcacagacagataagg

SEQ ID NO: 26235 - DNA, 25 bp, synthetic construct
  misc_feature 1..25: note = Oligonucleotide
  source 1..25: mol_type = other DNA
ggcactctgggttcacagacagata

SEQ ID NO: 26236 - DNA, 25 bp, synthetic construct
  misc_feature 1..25: note = Oligonucleotide
  source 1..25: mol_type = other DNA
gggggcactctgggttcacagacag

SEQ ID NO: 26237 - DNA, 25 bp, synthetic construct
  misc_feature 1..25: note = Oligonucleotide
  source 1..25: mol_type = other DNA
tcagggggcactctgggttcacaga

SEQ ID NO: 26238 - DNA, 25 bp, synthetic construct
  misc_feature 1..25: note = Oligonucleotide
  source 1..25: mol_type = other DNA
ggctcagggggcactctgggttcac

SEQ ID NO: 26239 - DNA, 25 bp, synthetic construct
  misc_feature 1..25: note = Oligonucleotide
  source 1..25: mol_type = other DNA
cgaggctcagggggcactctgggtt

SEQ ID NO: 26240 - DNA, 25 bp, synthetic construct
  misc_feature 1..25: note = Oligonucleotide
  source 1..25: mol_type = other DNA
ctgcgaggctcagggggcactctgg

SEQ ID NO: 26241 - DNA, 25 bp, synthetic construct
  misc_feature 1..25: note = Oligonucleotide
  source 1..25: mol_type = other DNA
gggctgcgaggctcagggggcactc

SEQ ID NO: 26242 - DNA, 25 bp, synthetic construct
  misc_feature 1..25: note = Oligonucleotide
  source 1..25: mol_type = other DNA
gctgggctgcgaggctcagggggca

SEQ ID NO: 26243 - DNA, 25 bp, synthetic construct
  misc_feature 1..25: note = Oligonucleotide
  source 1..25: mol_type = other DNA
ccagctgggctgcgaggctcagggg

SEQ ID NO: 26244 - DNA, 25 bp, synthetic construct
  misc_feature 1..25: note = Oligonucleotide
  source 1..25: mol_type = other DNA
tgtccagctgggctgcgaggctcag

SEQ ID NO: 26245 - DNA, 25 bp, synthetic construct
  misc_feature 1..25: note = Oligonucleotide
  source 1..25: mol_type = other DNA
cgttgtccagctgggctgcgaggct

SEQ ID NO: 26246 - DNA, 25 bp, synthetic construct
  misc_feature 1..25: note = Oligonucleotide
  source 1..25: mol_type = other DNA
tggcgttgtccagctgggctgcgag

SEQ ID NO: 26247 - DNA, 25 bp, synthetic construct
  misc_feature 1..25: note = Oligonucleotide
  source 1..25: mol_type = other DNA
ccgtggcgttgtccagctgggctgc

SEQ ID NO: 26248 - DNA, 25 bp, synthetic construct
  misc_feature 1..25: note = Oligonucleotide
  source 1..25: mol_type = other DNA
ggtccgtggcgttgtccagctgggc

SEQ ID NO: 26249 - DNA, 25 bp, synthetic construct
  misc_feature 1..25: note = Oligonucleotide
  source 1..25: mol_type = other DNA
gcaggtccgtggcgttgtccagctg

SEQ ID NO: 26250 - DNA, 25 bp, synthetic construct
  misc_feature 1..25: note = Oligonucleotide
  source 1..25: mol_type = other DNA
ttagcaggtccgtggcgttgtccag

SEQ ID NO: 26251 - DNA, 25 bp, synthetic construct
  misc_feature 1..25: note = Oligonucleotide
  source 1..25: mol_type = other DNA
cctttagcaggtccgtggcgttgtc

SEQ ID NO: 26252 - DNA, 25 bp, synthetic construct
  misc_feature 1..25: note = Oligonucleotide
  source 1..25: mol_type = other DNA
gcacctttagcaggtccgtggcgtt

SEQ ID NO: 26253 - DNA, 25 bp, synthetic construct
  misc_feature 1..25: note = Oligonucleotide
  source 1..25: mol_type = other DNA
tcagcacctttagcaggtccgtggc

SEQ ID NO: 26254 - DNA, 25 bp, synthetic construct
  misc_feature 1..25: note = Oligonucleotide
  source 1..25: mol_type = other DNA
tcttcagcacctttagcaggtccgt

SEQ ID NO: 26255 - DNA, 25 bp, synthetic construct
  misc_feature 1..25: note = Oligonucleotide
  source 1..25: mol_type = other DNA
cattcttcagcacctttagcaggtc

SEQ ID NO: 26256 - DNA, 25 bp, synthetic construct
  misc_feature 1..25: note = Oligonucleotide
  source 1..25: mol_type = other DNA
caccattcttcagcacctttagcag

SEQ ID NO: 26257 - DNA, 25 bp, synthetic construct
  misc_feature 1..25: note = Oligonucleotide
  source 1..25: mol_type = other DNA
caccaccattcttcagcacctttag

SEQ ID NO: 26258 - DNA, 25 bp, synthetic construct
  misc_feature 1..25: note = Oligonucleotide
  source 1..25: mol_type = other DNA
gggcaccaccattcttcagcacctt

SEQ ID NO: 26259 - DNA, 25 bp, synthetic construct
  misc_feature 1..25: note = Oligonucleotide
  source 1..25: mol_type = other DNA
ggtgggcaccaccattcttcagcac

SEQ ID NO: 26260 - DNA, 25 bp, synthetic construct
  misc_feature 1..25: note = Oligonucleotide
  source 1..25: mol_type = other DNA
ccaggtgggcaccaccattcttcag

SEQ ID NO: 26261 - DNA, 25 bp, synthetic construct
  misc_feature 1..25: note = Oligonucleotide
  source 1..25: mol_type = other DNA
agtccaggtgggcaccaccattctt

SEQ ID NO: 26262 - DNA, 25 bp, synthetic construct
  misc_feature 1..25: note = Oligonucleotide
  source 1..25: mol_type = other DNA
ggaagtccaggtgggcaccaccatt

SEQ ID NO: 26263 - DNA, 25 bp, synthetic construct
  misc_feature 1..25: note = Oligonucleotide
  source 1..25: mol_type = other DNA
tgcggaagtccaggtgggcaccacc

SEQ ID NO: 26264 - DNA, 25 bp, synthetic construct
  misc_feature 1..25: note = Oligonucleotide
  source 1..25: mol_type = other DNA
gagtgcggaagtccaggtgggcacc

SEQ ID NO: 26265 - DNA, 25 bp, synthetic construct
  misc_feature 1..25: note = Oligonucleotide
  source 1..25: mol_type = other DNA
cgcgagtgcggaagtccaggtgggc

SEQ ID NO: 26266 - DNA, 25 bp, synthetic construct
  misc_feature 1..25: note = Oligonucleotide
  source 1..25: mol_type = other DNA
catcgcgagtgcggaagtccaggtg

SEQ ID NO: 26267 - DNA, 25 bp, synthetic construct
  misc_feature 1..25: note = Oligonucleotide
  source 1..25: mol_type = other DNA
gcccatcgcgagtgcggaagtccag

SEQ ID NO: 26268 - DNA, 25 bp, synthetic construct
  misc_feature 1..25: note = Oligonucleotide
  source 1..25: mol_type = other DNA
tgagcccatcgcgagtgcggaagtc

SEQ ID NO: 26269 - DNA, 25 bp, synthetic construct
  misc_feature 1..25: note = Oligonucleotide
  source 1..25: mol_type = other DNA
cagtgagcccatcgcgagtgcggaa

SEQ ID NO: 26270 - DNA, 25 bp, synthetic construct
  misc_feature 1..25: note = Oligonucleotide
  source 1..25: mol_type = other DNA
cggcagtgagcccatcgcgagtgcg

SEQ ID NO: 26271 - DNA, 25 bp, synthetic construct
  misc_feature 1..25: note = Oligonucleotide
  source 1..25: mol_type = other DNA
gcacggcagtgagcccatcgcgagt

SEQ ID NO: 26272 - DNA, 25 bp, synthetic construct
  misc_feature 1..25: note = Oligonucleotide
  source 1..25: mol_type = other DNA
agtgcacggcagtgagcccatcgcg

SEQ ID NO: 26273 - DNA, 25 bp, synthetic construct
  misc_feature 1..25: note = Oligonucleotide
  source 1..25: mol_type = other DNA
cacagtgcacggcagtgagcccatc

SEQ ID NO: 26274 - DNA, 25 bp, synthetic construct
  misc_feature 1..25: note = Oligonucleotide
  source 1..25: mol_type = other DNA
tggcacagtgcacggcagtgagccc

SEQ ID NO: 26275 - DNA, 25 bp, synthetic construct
  misc_feature 1..25: note = Oligonucleotide
  source 1..25: mol_type = other DNA
gtgtggcacagtgcacggcagtgag

SEQ ID NO: 26276 - DNA, 25 bp, synthetic construct
  misc_feature 1..25: note = Oligonucleotide
  source 1..25: mol_type = other DNA
ggcgtgtggcacagtgcacggcagt

SEQ ID NO: 26277 - DNA, 25 bp, synthetic construct
  misc_feature 1..25: note = Oligonucleotide
  source 1..25: mol_type = other DNA
gctggcgtgtggcacagtgcacggc

SEQ ID NO: 26278 - DNA, 25 bp, synthetic construct
  misc_feature 1..25: note = Oligonucleotide
  source 1..25: mol_type = other DNA
tccgctggcgtgtggcacagtgcac

SEQ ID NO: 26279 - DNA, 25 bp, synthetic construct
  misc_feature 1..25: note = Oligonucleotide
  source 1..25: mol_type = other DNA
cattccgctggcgtgtggcacagtg

SEQ ID NO: 26280 - DNA, 25 bp, synthetic construct
  misc_feature 1..25: note = Oligonucleotide
  source 1..25: mol_type = other DNA
ccgcattccgctggcgtgtggcaca

SEQ ID NO: 26281 - DNA, 25 bp, synthetic construct
  misc_feature 1..25: note = Oligonucleotide
  source 1..25: mol_type = other DNA
ctgccgcattccgctggcgtgtggc

SEQ ID NO: 26282 - DNA, 25 bp, synthetic construct
  misc_feature 1..25: note = Oligonucleotide
  source 1..25: mol_type = other DNA
gtgctgccgcattccgctggcgtgt

SEQ ID NO: 26283 - DNA, 25 bp, synthetic construct
  misc_feature 1..25: note = Oligonucleotide
  source 1..25: mol_type = other DNA
tcagtgctgccgcattccgctggcg

SEQ ID NO: 26284 - DNA, 25 bp, synthetic construct
  misc_feature 1..25: note = Oligonucleotide
  source 1..25: mol_type = other DNA
ccgtcagtgctgccgcattccgctg

SEQ ID NO: 26285 - DNA, 25 bp, synthetic construct
  misc_feature 1..25: note = Oligonucleotide
  source 1..25: mol_type = other DNA
tgaccgtcagtgctgccgcattccg

SEQ ID NO: 26286 - DNA, 25 bp, synthetic construct
  misc_feature 1..25: note = Oligonucleotide
  source 1..25: mol_type = other DNA
cactgaccgtcagtgctgccgcatt

SEQ ID NO: 26287 - DNA, 25 bp, synthetic construct
  misc_feature 1..25: note = Oligonucleotide
  source 1..25: mol_type = other DNA
cctcactgaccgtcagtgctgccgc

SEQ ID NO: 26288 - DNA, 25 bp, synthetic construct
  misc_feature 1..25: note = Oligonucleotide
  source 1..25: mol_type = other DNA
cgccctcactgaccgtcagtgctgc

SEQ ID NO: 26289 - DNA, 25 bp, synthetic construct
  misc_feature 1..25: note = Oligonucleotide
  source 1..25: mol_type = other DNA
ccccgccctcactgaccgtcagtgc

SEQ ID NO: 26290 - DNA, 25 bp, synthetic construct
  misc_feature 1..25: note = Oligonucleotide
  source 1..25: mol_type = other DNA
aggccccgccctcactgaccgtcag

SEQ ID NO: 26291 - DNA, 25 bp, synthetic construct
  misc_feature 1..25: note = Oligonucleotide
  source 1..25: mol_type = other DNA
gccaggccccgccctcactgaccgt

SEQ ID NO: 26292 - DNA, 25 bp, synthetic construct
  misc_feature 1..25: note = Oligonucleotide
  source 1..25: mol_type = other DNA
caggccaggccccgccctcactgac

SEQ ID NO: 26293 - DNA, 25 bp, synthetic construct
  misc_feature 1..25: note = Oligonucleotide
  source 1..25: mol_type = other DNA
ctccaggccaggccccgccctcact

SEQ ID NO: 26294 - DNA, 25 bp, synthetic construct
  misc_feature 1..25: note = Oligonucleotide
  source 1..25: mol_type = other DNA
cccctccaggccaggccccgccctc

SEQ ID NO: 26295 - DNA, 25 bp, synthetic construct
  misc_feature 1..25: note = Oligonucleotide
  source 1..25: mol_type = other DNA
gagcccctccaggccaggccccgcc

SEQ ID NO: 26296 - DNA, 25 bp, synthetic construct
  misc_feature 1..25: note = Oligonucleotide
  source 1..25: mol_type = other DNA
caagagcccctccaggccaggcccc

SEQ ID NO: 26297 - DNA, 25 bp, synthetic construct
  misc_feature 1..25: note = Oligonucleotide
  source 1..25: mol_type = other DNA
aggcaagagcccctccaggccaggc

SEQ ID NO: 26298 - DNA, 25 bp, synthetic construct
  misc_feature 1..25: note = Oligonucleotide
  source 1..25: mol_type = other DNA
accaggcaagagcccctccaggcca

SEQ ID NO: 26299 - DNA, 25 bp, synthetic construct
  misc_feature 1..25: note = Oligonucleotide
  source 1..25: mol_type = other DNA
atcaccaggcaagagcccctccagg

SEQ ID NO: 26300 - DNA, 25 bp, synthetic construct
  misc_feature 1..25: note = Oligonucleotide
  source 1..25: mol_type = other DNA
cccatcaccaggcaagagcccctcc

SEQ ID NO: 26301 - DNA, 25 bp, synthetic construct
  misc_feature 1..25: note = Oligonucleotide
  source 1..25: mol_type = other DNA
agccccatcaccaggcaagagcccc

SEQ ID NO: 26302 - DNA, 25 bp, synthetic construct
  misc_feature 1..25: note = Oligonucleotide
  source 1..25: mol_type = other DNA
cccagccccatcaccaggcaagagc

SEQ ID NO: 26303 - DNA, 25 bp, synthetic construct
  misc_feature 1..25: note = Oligonucleotide
  source 1..25: mol_type = other DNA
gcccccagccccatcaccaggcaag

SEQ ID NO: 26304 - DNA, 25 bp, synthetic construct
  misc_feature 1..25: note = Oligonucleotide
  source 1..25: mol_type = other DNA
gctgcccccagccccatcaccaggc

SEQ ID NO: 26305 - DNA, 25 bp, synthetic construct
  misc_feature 1..25: note = Oligonucleotide
  source 1..25: mol_type = other DNA
ccagctgcccccagccccatcacca

SEQ ID NO: 26306 - DNA, 25 bp, synthetic construct
  misc_feature 1..25: note = Oligonucleotide
  source 1..25: mol_type = other DNA
ggcccagctgcccccagccccatca

SEQ ID NO: 26307 - DNA, 25 bp, synthetic construct
  misc_feature 1..25: note = Oligonucleotide
  source 1..25: mol_type = other DNA
ccaggcccagctgcccccagcccca

SEQ ID NO: 26308 - DNA, 25 bp, synthetic construct
  misc_feature 1..25: note = Oligonucleotide
  source 1..25: mol_type = other DNA
acaccaggcccagctgcccccagcc

SEQ ID NO: 26309 - DNA, 25 bp, synthetic construct
  misc_feature 1..25: note = Oligonucleotide
  source 1..25: mol_type = other DNA
tccacaccaggcccagctgccccca

SEQ ID NO: 26310 - DNA, 25 bp, synthetic construct
  misc_feature 1..25: note = Oligonucleotide
  source 1..25: mol_type = other DNA
gtatccacaccaggcccagctgccc

SEQ ID NO: 26311 - DNA, 25 bp, synthetic construct
  misc_feature 1..25: note = Oligonucleotide
  source 1..25: mol_type = other DNA
tcagtatccacaccaggcccagctg

SEQ ID NO: 26312 - DNA, 25 bp, synthetic construct
  misc_feature 1..25: note = Oligonucleotide
  source 1..25: mol_type = other DNA
gcctcagtatccacaccaggcccag

SEQ ID NO: 26313 - DNA, 25 bp, synthetic construct
  misc_feature 1..25: note = Oligonucleotide
  source 1..25: mol_type = other DNA
gcagcctcagtatccacaccaggcc

SEQ ID NO: 26314 - DNA, 25 bp, synthetic construct
  misc_feature 1..25: note = Oligonucleotide
  source 1..25: mol_type = other DNA
tgagcagcctcagtatccacaccag

SEQ ID NO: 26315 - DNA, 25 bp, synthetic construct
  misc_feature 1..25: note = Oligonucleotide
  source 1..25: mol_type = other DNA
gggtgagcagcctcagtatccacac

SEQ ID NO: 26316 - DNA, 25 bp, synthetic construct
  misc_feature 1..25: note = Oligonucleotide
  source 1..25: mol_type = other DNA
tgagggtgagcagcctcagtatcca

SEQ ID NO: 26317 - DNA, 25 bp, synthetic construct
  misc_feature 1..25: note = Oligonucleotide
  source 1..25: mol_type = other DNA
gtctgagggtgagcagcctcagtat

SEQ ID NO: 26318 - DNA, 25 bp, synthetic construct
  misc_feature 1..25: note = Oligonucleotide
  source 1..25: mol_type = other DNA
agggtctgagggtgagcagcctcag

SEQ ID NO: 26319 - DNA, 25 bp, synthetic construct
  misc_feature 1..25: note = Oligonucleotide
  source 1..25: mol_type = other DNA
agcagggtctgagggtgagcagcct

SEQ ID NO: 26320 - DNA, 25 bp, synthetic construct
  misc_feature 1..25: note = Oligonucleotide
  source 1..25: mol_type = other DNA
tccagcagggtctgagggtgagcag

SEQ ID NO: 26321 - DNA, 25 bp, synthetic construct
  misc_feature 1..25: note = Oligonucleotide
  source 1..25: mol_type = other DNA
aggtccagcagggtctgagggtgag

SEQ ID NO: 26322 - DNA, 25 bp, synthetic construct
  misc_feature 1..25: note = Oligonucleotide
  source 1..25: mol_type = other DNA
cccaggtccagcagggtctgagggt

SEQ ID NO: 26323 - DNA, 25 bp, synthetic construct
  misc_feature 1..25: note = Oligonucleotide
  source 1..25: mol_type = other DNA
gcccccaggtccagcagggtctgag

SEQ ID NO: 26324 - DNA, 25 bp, synthetic construct
  misc_feature 1..25: note = Oligonucleotide
  source 1..25: mol_type = other DNA
gaagcccccaggtccagcagggtct

SEQ ID NO: 26325 - DNA, 25 bp, synthetic construct
  misc_feature 1..25: note = Oligonucleotide
  source 1..25: mol_type = other DNA
ggtgaagcccccaggtccagcaggg

SEQ ID NO: 26326 - DNA, 25 bp, synthetic construct
  misc_feature 1..25: note = Oligonucleotide
  source 1..25: mol_type = other DNA
tcaggtgaagcccccaggtccagca

SEQ ID NO: 26327 - DNA, 25 bp, synthetic construct
  misc_feature 1..25: note = Oligonucleotide
  source 1..25: mol_type = other DNA
tagtcaggtgaagcccccaggtcca

SEQ ID NO: 26328 - DNA, 25 bp, synthetic construct
  misc_feature 1..25: note = Oligonucleotide
  source 1..25: mol_type = other DNA
ttgtagtcaggtgaagcccccaggt

SEQ ID NO: 26329 - DNA, 25 bp, synthetic construct
  misc_feature 1..25: note = Oligonucleotide
  source 1..25: mol_type = other DNA
tccttgtagtcaggtgaagccccca

SEQ ID NO: 26330 - DNA, 25 bp, synthetic construct
  misc_feature 1..25: note = Oligonucleotide
  source 1..25: mol_type = other DNA
ctgtccttgtagtcaggtgaagccc

SEQ ID NO: 26331 - DNA, 25 bp, synthetic construct
  misc_feature 1..25: note = Oligonucleotide
  source 1..25: mol_type = other DNA
cggctgtccttgtagtcaggtgaag

SEQ ID NO: 26332 - DNA, 25 bp, synthetic construct
  misc_feature 1..25: note = Oligonucleotide
  source 1..25: mol_type = other DNA
ccgcggctgtccttgtagtcaggtg

SEQ ID NO: 26333 - DNA, 25 bp, synthetic construct
  misc_feature 1..25: note = Oligonucleotide
  source 1..25: mol_type = other DNA
aagccgcggctgtccttgtagtcag

SEQ ID NO: 26334 - DNA, 25 bp, synthetic construct
  misc_feature 1..25: note = Oligonucleotide
  source 1..25: mol_type = other DNA
gtcaagccgcggctgtccttgtagt

SEQ ID NO: 26335 - DNA, 25 bp, synthetic construct
  misc_feature 1..25: note = Oligonucleotide
  source 1..25: mol_type = other DNA
ggtgtcaagccgcggctgtccttgt

SEQ ID NO: 26336 - DNA, 25 bp, synthetic construct
  misc_feature 1..25: note = Oligonucleotide
  source 1..25: mol_type = other DNA
aggggtgtcaagccgcggctgtcct

SEQ ID NO: 26337 - DNA, 25 bp, synthetic construct
  misc_feature 1..25: note = Oligonucleotide
  source 1..25: mol_type = other DNA
tagaggggtgtcaagccgcggctgt

SEQ ID NO: 26338 - DNA, 25 bp, synthetic construct
  misc_feature 1..25: note = Oligonucleotide
  source 1..25: mol_type = other DNA
tggtagaggggtgtcaagccgcggc

SEQ ID NO: 26339 - DNA, 25 bp, synthetic construct
  misc_feature 1..25: note = Oligonucleotide
  source 1..25: mol_type = other DNA
ctgtggtagaggggtgtcaagccgc

SEQ ID NO: 26340 - DNA, 25 bp, synthetic construct
  misc_feature 1..25: note = Oligonucleotide
  source 1..25: mol_type = other DNA
gcgctgtggtagaggggtgtcaagc

SEQ ID NO: 26341 - DNA, 25 bp, synthetic construct
  misc_feature 1..25: note = Oligonucleotide
  source 1..25: mol_type = other DNA
agggcgctgtggtagaggggtgtca

SEQ ID NO: 26342 - DNA, 25 bp, synthetic construct
  misc_feature 1..25: note = Oligonucleotide
  source 1..25: mol_type = other DNA
cccagggcgctgtggtagaggggtg

SEQ ID NO: 26343 - DNA, 25 bp, synthetic construct
  misc_feature 1..25: note = Oligonucleotide
  source 1..25: mol_type = other DNA
ccccccagggcgctgtggtagaggg

SEQ ID NO: 26344 - DNA, 25 bp, synthetic construct
  misc_feature 1..25: note = Oligonucleotide
  source 1..25: mol_type = other DNA
ccaccccccagggcgctgtggtaga

SEQ ID NO: 26345 - DNA, 25 bp, synthetic construct
  misc_feature 1..25: note = Oligonucleotide
  source 1..25: mol_type = other DNA
tccccaccccccagggcgctgtggt

SEQ ID NO: 26346 - DNA, 25 bp, synthetic construct
  misc_feature 1..25: note = Oligonucleotide
  source 1..25: mol_type = other DNA
gcatccccaccccccagggcgctgt

SEQ ID NO: 26347 - DNA, 25 bp, synthetic construct
  misc_feature 1..25: note = Oligonucleotide
  source 1..25: mol_type = other DNA
agggcatccccaccccccagggcgc

SEQ ID NO: 26348 - DNA, 25 bp, synthetic construct
  misc_feature 1..25: note = Oligonucleotide
  source 1..25: mol_type = other DNA
cagagggcatccccaccccccaggg

SEQ ID NO: 26349 - DNA, 25 bp, synthetic construct
  misc_feature 1..25: note = Oligonucleotide
  source 1..25: mol_type = other DNA
cagcagagggcatccccacccccca

SEQ ID NO: 26350 - DNA, 25 bp, synthetic construct
  misc_feature 1..25: note = Oligonucleotide
  source 1..25: mol_type = other DNA
tcacagcagagggcatccccacccc

SEQ ID NO: 26351 - DNA, 25 bp, synthetic construct
  misc_feature 1..25: note = Oligonucleotide
  source 1..25: mol_type = other DNA
agctcacagcagagggcatccccac

SEQ ID NO: 26352 - DNA, 25 bp, synthetic construct
  misc_feature 1..25: note = Oligonucleotide
  source 1..25: mol_type = other DNA
agcagctcacagcagagggcatccc

SEQ ID NO: 26353 - DNA, 25 bp, synthetic construct
  misc_feature 1..25: note = Oligonucleotide
  source 1..25: mol_type = other DNA
agaagcagctcacagcagagggcat

SEQ ID NO: 26354 - DNA, 25 bp, synthetic construct
  misc_feature 1..25: note = Oligonucleotide
  source 1..25: mol_type = other DNA
tggagaagcagctcacagcagaggg

SEQ ID NO: 26355 - DNA, 25 bp, synthetic construct
  misc_feature 1..25: note = Oligonucleotide
  source 1..25: mol_type = other DNA
tcgtggagaagcagctcacagcaga

SEQ ID NO: 26356 - DNA, 25 bp, synthetic construct
  misc_feature 1..25: note = Oligonucleotide
  source 1..25: mol_type = other DNA
tggtcgtggagaagcagctcacagc

SEQ ID NO: 26357 - DNA, 25 bp, synthetic construct
  misc_feature 1..25: note = Oligonucleotide
  source 1..25: mol_type = other DNA
gcgtggtcgtggagaagcagctcac

SEQ ID NO: 26358 - DNA, 25 bp, synthetic construct
  misc_feature 1..25: note = Oligonucleotide
  source 1..25: mol_type = other DNA
tgagcgtggtcgtggagaagcagct

SEQ ID NO: 26359 - DNA, 25 bp, synthetic construct
  misc_feature 1..25: note = Oligonucleotide
  source 1..25: mol_type = other DNA
agctgagcgtggtcgtggagaagca

SEQ ID NO: 26360 - DNA, 25 bp, synthetic construct
  misc_feature 1..25: note = Oligonucleotide
  source 1..25: mol_type = other DNA
cccagctgagcgtggtcgtggagaa

SEQ ID NO: 26361 - DNA, 25 bp, synthetic construct
  misc_feature 1..25: note = Oligonucleotide
  source 1..25: mol_type = other DNA
atccccagctgagcgtggtcgtgga

SEQ ID NO: 26362 - DNA, 25 bp, synthetic construct
  misc_feature 1..25: note = Oligonucleotide
  source 1..25: mol_type = other DNA
gtgatccccagctgagcgtggtcgt

SEQ ID NO: 26363 - DNA, 25 bp, synthetic construct
  misc_feature 1..25: note = Oligonucleotide
  source 1..25: mol_type = other DNA
tcggtgatccccagctgagcgtggt

SEQ ID NO: 26364 - DNA, 25 bp, synthetic construct
  misc_feature 1..25: note = Oligonucleotide
  source 1..25: mol_type = other DNA
tcgtcggtgatccccagctgagcgt

SEQ ID NO: 26365 - DNA, 25 bp, synthetic construct
  misc_feature 1..25: note = Oligonucleotide
  source 1..25: mol_type = other DNA
ttctcgtcggtgatccccagctgag

SEQ ID NO: 26366 - DNA, 25 bp, synthetic construct
  misc_feature 1..25: note = Oligonucleotide
  source 1..25: mol_type = other DNA
ccattctcgtcggtgatccccagct

SEQ ID NO: 26367 - DNA, 25 bp, synthetic construct
  misc_feature 1..25: note = Oligonucleotide
  source 1..25: mol_type = other DNA
cagccattctcgtcggtgatcccca

SEQ ID NO: 26368 - DNA, 25 bp, synthetic construct
  misc_feature 1..25: note = Oligonucleotide
  source 1..25: mol_type = other DNA
tgccagccattctcgtcggtgatcc

SEQ ID NO: 26369 - DNA, 25 bp, synthetic construct
  misc_feature 1..25: note = Oligonucleotide
  source 1..25: mol_type = other DNA
tcctgccagccattctcgtcggtga

SEQ ID NO: 26370 - DNA, 25 bp, synthetic construct
  misc_feature 1..25: note = Oligonucleotide
  source 1..25: mol_type = other DNA
atctcctgccagccattctcgtcgg

SEQ ID NO: 26371 - DNA, 25 bp, synthetic construct
  misc_feature 1..25: note = Oligonucleotide
  source 1..25: mol_type = other DNA
tggatctcctgccagccattctcgt

SEQ ID NO: 26372 - DNA, 25 bp, synthetic construct
  misc_feature 1..25: note = Oligonucleotide
  source 1..25: mol_type = other DNA
tggtggatctcctgccagccattct

SEQ ID NO: 26373 - DNA, 25 bp, synthetic construct
  misc_feature 1..25: note = Oligonucleotide
  source 1..25: mol_type = other DNA
acctggtggatctcctgccagccat

SEQ ID NO: 26374 - DNA, 25 bp, synthetic construct
  misc_feature 1..25: note = Oligonucleotide
  source 1..25: mol_type = other DNA
cacacctggtggatctcctgccagc

SEQ ID NO: 26375 - DNA, 25 bp, synthetic construct
  misc_feature 1..25: note = Oligonucleotide
  source 1..25: mol_type = other DNA
ctgcacacctggtggatctcctgcc

SEQ ID NO: 26376 - DNA, 25 bp, synthetic construct
  misc_feature 1..25: note = Oligonucleotide
  source 1..25: mol_type = other DNA
tccctgcacacctggtggatctcct

SEQ ID NO: 26377 - DNA, 25 bp, synthetic construct
  misc_feature 1..25: note = Oligonucleotide
  source 1..25: mol_type = other DNA
ggctccctgcacacctggtggatct

SEQ ID NO: 26378 - DNA, 25 bp, synthetic construct
  misc_feature 1..25: note = Oligonucleotide
  source 1..25: mol_type = other DNA
ctcggctccctgcacacctggtgga

SEQ ID NO: 26379 - DNA, 25 bp, synthetic construct
  misc_feature 1..25: note = Oligonucleotide
  source 1..25: mol_type = other DNA
cacctcggctccctgcacacctggt

SEQ ID NO: 26380 - DNA, 25 bp, synthetic construct
  misc_feature 1..25: note = Oligonucleotide
  source 1..25: mol_type = other DNA
ccccacctcggctccctgcacacct

SEQ ID NO: 26381 - DNA, 25 bp, synthetic construct
  misc_feature 1..25: note = Oligonucleotide
  source 1..25: mol_type = other DNA
ggaccccacctcggctccctgcaca

SEQ ID NO: 26382 - DNA, 25 bp, synthetic construct
  misc_feature 1..25: note = Oligonucleotide
  source 1..25: mol_type = other DNA
ccgggaccccacctcggctccctgc

SEQ ID NO: 26383 - DNA, 25 bp, synthetic construct
  misc_feature 1..25: note = Oligonucleotide
  source 1..25: mol_type = other DNA
aggccgggaccccacctcggctccc

SEQ ID NO: 26384 - DNA, 25 bp, synthetic construct
  misc_feature 1..25: note = Oligonucleotide
  source 1..25: mol_type = other DNA
cagaggccgggaccccacctcggct

SEQ ID NO: 26385 - DNA, 25 bp, synthetic construct
  misc_feature 1..25: note = Oligonucleotide
  source 1..25: mol_type = other DNA
acacagaggccgggaccccacctcg

SEQ ID NO: 26386 - DNA, 25 bp, synthetic construct
  misc_feature 1..25: note = Oligonucleotide
  source 1..25: mol_type = other DNA
agcacacagaggccgggaccccacc

SEQ ID NO: 26387 - DNA, 25 bp, synthetic construct
  misc_feature 1..25: note = Oligonucleotide
  source 1..25: mol_type = other DNA
cccagcacacagaggccgggacccc

SEQ ID NO: 26388 - DNA, 25 bp, synthetic construct
  misc_feature 1..25: note = Oligonucleotide
  source 1..25: mol_type = other DNA
caacccagcacacagaggccgggac

SEQ ID NO: 26389 - DNA, 25 bp, synthetic construct
  misc_feature 1..25: note = Oligonucleotide
  source 1..25: mol_type = other DNA
ccccaacccagcacacagaggccgg

SEQ ID NO: 26390 - DNA, 25 bp, synthetic construct
  misc_feature 1..25: note = Oligonucleotide
  source 1..25: mol_type = other DNA
gacccccaacccagcacacagaggc

SEQ ID NO: 26391 - DNA, 25 bp, synthetic construct
  misc_feature 1..25: note = Oligonucleotide
  source 1..25: mol_type = other DNA
caggacccccaacccagcacacaga

SEQ ID NO: 26392 - DNA, 25 bp, synthetic construct
  misc_feature 1..25: note = Oligonucleotide
  source 1..25: mol_type = other DNA
agccaggacccccaacccagcacac

SEQ ID NO: 26393 - DNA, 25 bp, synthetic construct
  misc_feature 1..25: note = Oligonucleotide
  source 1..25: mol_type = other DNA
cagagccaggacccccaacccagca

SEQ ID NO: 26394 - DNA, 25 bp, synthetic construct
  misc_feature 1..25: note = Oligonucleotide
  source 1..25: mol_type = other DNA
agacagagccaggacccccaaccca

SEQ ID NO: 26395 - DNA, 25 bp, synthetic construct
  misc_feature 1..25: note = Oligonucleotide
  source 1..25: mol_type = other DNA
tacagacagagccaggacccccaac

SEQ ID NO: 26396 - DNA, 25 bp, synthetic construct
  misc_feature 1..25: note = Oligonucleotide
  source 1..25: mol_type = other DNA
ccctacagacagagccaggaccccc

SEQ ID NO: 26397 - DNA, 25 bp, synthetic construct
  misc_feature 1..25: note = Oligonucleotide
  source 1..25: mol_type = other DNA
cacccctacagacagagccaggacc

SEQ ID NO: 26398 - DNA, 25 bp, synthetic construct
  misc_feature 1..25: note = Oligonucleotide
  source 1..25: mol_type = other DNA
ccccacccctacagacagagccagg

SEQ ID NO: 26399 - DNA, 25 bp, synthetic construct
  misc_feature 1..25: note = Oligonucleotide
  source 1..25: mol_type = other DNA
ggcccccacccctacagacagagcc

SEQ ID NO: 26400 - DNA, 25 bp, synthetic construct
  misc_feature 1..25: note = Oligonucleotide
  source 1..25: mol_type = other DNA
tagggcccccacccctacagacaga

SEQ ID NO: 26401 - DNA, 25 bp, synthetic construct
  misc_feature 1..25: note = Oligonucleotide
  source 1..25: mol_type = other DNA
ggctagggcccccacccctacagac

SEQ ID NO: 26402 - DNA, 25 bp, synthetic construct
  misc_feature 1..25: note = Oligonucleotide
  source 1..25: mol_type = other DNA
agaggctagggcccccacccctaca

SEQ ID NO: 26403 - DNA, 25 bp, synthetic construct
  misc_feature 1..25: note = Oligonucleotide
  source 1..25: mol_type = other DNA
ggcagaggctagggcccccacccct

SEQ ID NO: 26404 - DNA, 25 bp, synthetic construct
  misc_feature 1..25: note = Oligonucleotide
  source 1..25: mol_type = other DNA
ctgggcagaggctagggcccccacc

SEQ ID NO: 26405 - DNA, 25 bp, synthetic construct
  misc_feature 1..25: note = Oligonucleotide
  source 1..25: mol_type = other DNA
tccctgggcagaggctagggccccc

SEQ ID NO: 26406 - DNA, 25 bp, synthetic construct
  misc_feature 1..25: note = Oligonucleotide
  source 1..25: mol_type = other DNA
gggtccctgggcagaggctagggcc

SEQ ID NO: 26407 - DNA, 25 bp, synthetic construct
  misc_feature 1..25: note = Oligonucleotide
  source 1..25: mol_type = other DNA
gtagggtccctgggcagaggctagg

SEQ ID NO: 26408 - DNA, 25 bp, synthetic construct
  misc_feature 1..25: note = Oligonucleotide
  source 1..25: mol_type = other DNA
gctgtagggtccctgggcagaggct

SEQ ID NO: 26409 - DNA, 25 bp, synthetic construct
  misc_feature 1..25: note = Oligonucleotide
  source 1..25: mol_type = other DNA
ggtgctgtagggtccctgggcagag

SEQ ID NO: 26410 - DNA, 25 bp, synthetic construct
  misc_feature 1..25: note = Oligonucleotide
  source 1..25: mol_type = other DNA
caaggtgctgtagggtccctgggca

SEQ ID NO: 26411 - DNA, 25 bp, synthetic construct
  misc_feature 1..25: note = Oligonucleotide
  source 1..25: mol_type = other DNA
gagcaaggtgctgtagggtccctgg

SEQ ID NO: 26412 - DNA, 25 bp, synthetic construct
  misc_feature 1..25: note = Oligonucleotide
  source 1..25: mol_type = other DNA
gaagagcaaggtgctgtagggtccc

SEQ ID NO: 26413 - DNA, 25 bp, synthetic construct
  misc_feature 1..25: note = Oligonucleotide
  source 1..25: mol_type = other DNA
ggggaagagcaaggtgctgtagggt

SEQ ID NO: 26414 - DNA, 25 bp, synthetic construct
  misc_feature 1..25: note = Oligonucleotide
  source 1..25: mol_type = other DNA
ctgggggaagagcaaggtgctgtag

SEQ ID NO: 26415 - DNA, 25 bp, synthetic construct
  misc_feature 1..25: note = Oligonucleotide
  source 1..25: mol_type = other DNA
ggcctgggggaagagcaaggtgctg

SEQ ID NO: 26416 - DNA, 25 bp, synthetic construct
  misc_feature 1..25: note = Oligonucleotide
  source 1..25: mol_type = other DNA
gcaggcctgggggaagagcaaggtg

SEQ ID NO: 26417 - DNA, 25 bp, synthetic construct
  misc_feature 1..25: note = Oligonucleotide
  source 1..25: mol_type = other DNA
gcggcaggcctgggggaagagcaag

SEQ ID NO: 26418 - DNA, 25 bp, synthetic construct
  misc_feature 1..25: note = Oligonucleotide
  source 1..25: mol_type = other DNA
aaagcggcaggcctgggggaagagc

SEQ ID NO: 26419 - DNA, 25 bp, synthetic construct
  misc_feature 1..25: note = Oligonucleotide
  source 1..25: mol_type = other DNA
cccaaagcggcaggcctgggggaag

SEQ ID NO: 26420 - DNA, 25 bp, synthetic construct
  misc_feature 1..25: note = Oligonucleotide
  source 1..25: mol_type = other DNA
gtgcccaaagcggcaggcctggggg

SEQ ID NO: 26421 - DNA, 25 bp, synthetic construct
  misc_feature 1..25: note = Oligonucleotide
  source 1..25: mol_type = other DNA
cacgtgcccaaagcggcaggcctgg

SEQ ID NO: 26422 - DNA, 25 bp, synthetic construct
  misc_feature 1..25: note = Oligonucleotide
  source 1..25: mol_type = other DNA
ctgcacgtgcccaaagcggcaggcc

SEQ ID NO: 26423 - DNA, 25 bp, synthetic construct
  misc_feature 1..25: note = Oligonucleotide
  source 1..25: mol_type = other DNA
atgctgcacgtgcccaaagcggcag

SEQ ID NO: 26424 - DNA, 25 bp, synthetic construct
  misc_feature 1..25: note = Oligonucleotide
  source 1..25: mol_type = other DNA
cagatgctgcacgtgcccaaagcgg

SEQ ID NO: 26425 - DNA, 25 bp, synthetic construct
  misc_feature 1..25: note = Oligonucleotide
  source 1..25: mol_type = other DNA
ctccagatgctgcacgtgcccaaag

SEQ ID NO: 26426 - DNA, 25 bp, synthetic construct
  misc_feature 1..25: note = Oligonucleotide
  source 1..25: mol_type = other DNA
gtgctccagatgctgcacgtgccca

SEQ ID NO: 26427 - DNA, 25 bp, synthetic construct
  misc_feature 1..25: note = Oligonucleotide
  source 1..25: mol_type = other DNA
caggtgctccagatgctgcacgtgc

SEQ ID NO: 26428 - DNA, 25 bp, synthetic construct
  misc_feature 1..25: note = Oligonucleotide
  source 1..25: mol_type = other DNA
cagcaggtgctccagatgctgcacg

SEQ ID NO: 26429 - DNA, 25 bp, synthetic construct
  misc_feature 1..25: note = Oligonucleotide
  source 1..25: mol_type = other DNA
gaacagcaggtgctccagatgctgc

SEQ ID NO: 26430 - DNA, 25 bp, synthetic construct
  misc_feature 1..25: note = Oligonucleotide
  source 1..25: mol_type = other DNA
atagaacagcaggtgctccagatgc

SEQ ID NO: 26431 - DNA, 25 bp, synthetic construct
  misc_feature 1..25: note = Oligonucleotide
  source 1..25: mol_type = other DNA
cccatagaacagcaggtgctccaga

SEQ ID NO: 26432 - DNA, 25 bp, synthetic construct
  misc_feature 1..25: note = Oligonucleotide
  source 1..25: mol_type = other DNA
tgccccatagaacagcaggtgctcc

SEQ ID NO: 26433 - DNA, 25 bp, synthetic construct
  misc_feature 1..25: note = Oligonucleotide
  source 1..25: mol_type = other DNA
gtctgccccatagaacagcaggtgc

SEQ ID NO: 26434 - DNA, 25 bp, synthetic construct
  misc_feature 1..25: note = Oligonucleotide
  source 1..25: mol_type = other DNA
catgtctgccccatagaacagcagg

SEQ ID NO: 26435 - DNA, 25 bp, synthetic construct
  misc_feature 1..25: note = Oligonucleotide
  source 1..25: mol_type = other DNA
ccccatgtctgccccatagaacagc

SEQ ID NO: 26436 - DNA, 25 bp, synthetic construct
  misc_feature 1..25: note = Oligonucleotide
  source 1..25: mol_type = other DNA
ggcccccatgtctgccccatagaac

SEQ ID NO: 26437 - DNA, 25 bp, synthetic construct
  misc_feature 1..25: note = Oligonucleotide
  source 1..25: mol_type = other DNA
ctgggcccccatgtctgccccatag

SEQ ID NO: 26438 - DNA, 25 bp, synthetic construct
  misc_feature 1..25: note = Oligonucleotide
  source 1..25: mol_type = other DNA
gttctgggcccccatgtctgcccca

SEQ ID NO: 26439 - DNA, 25 bp, synthetic construct
  misc_feature 1..25: note = Oligonucleotide
  source 1..25: mol_type = other DNA
ggcgttctgggcccccatgtctgcc

SEQ ID NO: 26440 - DNA, 25 bp, synthetic construct
  misc_feature 1..25: note = Oligonucleotide
  source 1..25: mol_type = other DNA
cgaggcgttctgggcccccatgtct

SEQ ID NO: 26441 - DNA, 25 bp, synthetic construct
  misc_feature 1..25: note = Oligonucleotide
  source 1..25: mol_type = other DNA
ccccgaggcgttctgggcccccatg

SEQ ID NO: 26442 - DNA, 25 bp, synthetic construct
  misc_feature 1..25: note = Oligonucleotide
  source 1..25: mol_type = other DNA
gttccccgaggcgttctgggccccc

SEQ ID NO: 26443 - DNA, 25 bp, synthetic construct
  misc_feature 1..25: note = Oligonucleotide
  source 1..25: mol_type = other DNA
tgtgttccccgaggcgttctgggcc

SEQ ID NO: 26444 - DNA, 25 bp, synthetic construct
  misc_feature 1..25: note = Oligonucleotide
  source 1..25: mol_type = other DNA
ggctgtgttccccgaggcgttctgg

SEQ ID NO: 26445 - DNA, 25 bp, synthetic construct
  misc_feature 1..25: note = Oligonucleotide
  source 1..25: mol_type = other DNA
cagggctgtgttccccgaggcgttc

SEQ ID NO: 26446 - DNA, 25 bp, synthetic construct
  misc_feature 1..25: note = Oligonucleotide
  source 1..25: mol_type = other DNA
gtgcagggctgtgttccccgaggcg

SEQ ID NO: 26447 - DNA, 25 bp, synthetic construct
  misc_feature 1..25: note = Oligonucleotide
  source 1..25: mol_type = other DNA
gatgtgcagggctgtgttccccgag

SEQ ID NO: 26448 - DNA, 25 bp, synthetic construct
  misc_feature 1..25: note = Oligonucleotide
  source 1..25: mol_type = other DNA
acagatgtgcagggctgtgttcccc

SEQ ID NO: 26449 - DNA, 25 bp, synthetic construct
  misc_feature 1..25: note = Oligonucleotide
  source 1..25: mol_type = other DNA
ggcacagatgtgcagggctgtgttc

SEQ ID NO: 26450 - DNA, 25 bp, synthetic construct
  misc_feature 1..25: note = Oligonucleotide
  source 1..25: mol_type = other DNA
gagggcacagatgtgcagggctgtg

SEQ ID NO: 26451 - DNA, 25 bp, synthetic construct
  misc_feature 1..25: note = Oligonucleotide
  source 1..25: mol_type = other DNA
gtagagggcacagatgtgcagggct

SEQ ID NO: 26452 - DNA, 25 bp, synthetic construct
  misc_feature 1..25: note = Oligonucleotide
  source 1..25: mol_type = other DNA
gttgtagagggcacagatgtgcagg

SEQ ID NO: 26453 - DNA, 25 bp, synthetic construct
  misc_feature 1..25: note = Oligonucleotide
  source 1..25: mol_type = other DNA
ctggttgtagagggcacagatgtgc

SEQ ID NO: 26454 - DNA, 25 bp, synthetic construct
  misc_feature 1..25: note = Oligonucleotide
  source 1..25: mol_type = other DNA
cacctggttgtagagggcacagatg

SEQ ID NO: 26455 - DNA, 25 bp, synthetic construct
  misc_feature 1..25: note = Oligonucleotide
  source 1..25: mol_type = other DNA
tcgcacctggttgtagagggcacag

SEQ ID NO: 26456 - DNA, 25 bp, synthetic construct
  misc_feature 1..25: note = Oligonucleotide
  source 1..25: mol_type = other DNA
cagtcgcacctggttgtagagggca

SEQ ID NO: 26457 - DNA, 25 bp, synthetic construct
  misc_feature 1..25: note = Oligonucleotide
  source 1..25: mol_type = other DNA
acacagtcgcacctggttgtagagg

SEQ ID NO: 26458 - DNA, 25 bp, synthetic construct
  misc_feature 1..25: note = Oligonucleotide
  source 1..25: mol_type = other DNA
gacacacagtcgcacctggttgtag

SEQ ID NO: 26459 - DNA, 25 bp, synthetic construct
  misc_feature 1..25: note = Oligonucleotide
  source 1..25: mol_type = other DNA
caggacacacagtcgcacctggttg

SEQ ID NO: 26460 - DNA, 25 bp, synthetic construct
  misc_feature 1..25: note = Oligonucleotide
  source 1..25: mol_type = other DNA
gtgcaggacacacagtcgcacctgg

SEQ ID NO: 26461 - DNA, 25 bp, synthetic construct
  misc_feature 1..25: note = Oligonucleotide
  source 1..25: mol_type = other DNA
catgtgcaggacacacagtcgcacc

SEQ ID NO: 26462 - DNA, 25 bp, synthetic construct
  misc_feature 1..25: note = Oligonucleotide
  source 1..25: mol_type = other DNA
aggcatgtgcaggacacacagtcgc

SEQ ID NO: 26463 - DNA, 25 bp, synthetic construct
  misc_feature 1..25: note = Oligonucleotide
  source 1..25: mol_type = other DNA
tgcaggcatgtgcaggacacacagt

SEQ ID NO: 26464 - DNA, 25 bp, synthetic construct
  misc_feature 1..25: note = Oligonucleotide
  source 1..25: mol_type = other DNA
tggtgcaggcatgtgcaggacacac

SEQ ID NO: 26465 - DNA, 25 bp, synthetic construct
  misc_feature 1..25: note = Oligonucleotide
  source 1..25: mol_type = other DNA
cgctggtgcaggcatgtgcaggaca

SEQ ID NO: 26466 - DNA, 25 bp, synthetic construct
  misc_feature 1..25: note = Oligonucleotide
  source 1..25: mol_type = other DNA
actcgctggtgcaggcatgtgcagg

SEQ ID NO: 26467 - DNA, 25 bp, synthetic construct
  misc_feature 1..25: note = Oligonucleotide
  source 1..25: mol_type = other DNA
cacactcgctggtgcaggcatgtgc

SEQ ID NO: 26468 - DNA, 25 bp, synthetic construct
  misc_feature 1..25: note = Oligonucleotide
  source 1..25: mol_type = other DNA
atgcacactcgctggtgcaggcatg

SEQ ID NO: 26469 - DNA, 25 bp, synthetic construct
  misc_feature 1..25: note = Oligonucleotide
  source 1..25: mol_type = other DNA
tatatgcacactcgctggtgcaggc

SEQ ID NO: 26470 - DNA, 25 bp, synthetic construct
  misc_feature 1..25: note = Oligonucleotide
  source 1..25: mol_type = other DNA
aagtatatgcacactcgctggtgca

SEQ ID NO: 26471 - DNA, 25 bp, synthetic construct
  misc_feature 1..25: note = Oligonucleotide
  source 1..25: mol_type = other DNA
ggcaagtatatgcacactcgctggt

SEQ ID NO: 26472 - DNA, 25 bp, synthetic construct
  misc_feature 1..25: note = Oligonucleotide
  source 1..25: mol_type = other DNA
agaggcaagtatatgcacactcgct

SEQ ID NO: 26473 - DNA, 25 bp, synthetic construct
  misc_feature 1..25: note = Oligonucleotide
  source 1..25: mol_type = other DNA
agaagaggcaagtatatgcacactc

SEQ ID NO: 26474 - DNA, 25 bp, synthetic construct
  misc_feature 1..25: note = Oligonucleotide
  source 1..25: mol_type = other DNA
cccagaagaggcaagtatatgcaca

SEQ ID NO: 26475 - DNA, 25 bp, synthetic construct
  misc_feature 1..25: note = Oligonucleotide
  source 1..25: mol_type = other DNA
acccccagaagaggcaagtatatgc

SEQ ID NO: 26476 - DNA, 25 bp, synthetic construct
  misc_feature 1..25: note = Oligonucleotide
  source 1..25: mol_type = other DNA
tacacccccagaagaggcaagtata

SEQ ID NO: 26477 - DNA, 25 bp, synthetic construct
  misc_feature 1..25: note = Oligonucleotide
  source 1..25: mol_type = other DNA
acatacacccccagaagaggcaagt

SEQ ID NO: 26478 - DNA, 25 bp, synthetic construct
  misc_feature 1..25: note = Oligonucleotide
  source 1..25: mol_type = other DNA
cacacatacacccccagaagaggca

SEQ ID NO: 26479 - DNA, 25 bp, synthetic construct
  misc_feature 1..25: note = Oligonucleotide
  source 1..25: mol_type = other DNA
acacacacatacacccccagaagag

SEQ ID NO: 26480 - DNA, 25 bp, synthetic construct
  misc_feature 1..25: note = Oligonucleotide
  source 1..25: mol_type = other DNA
cccacacacacatacacccccagaa

SEQ ID NO: 26481 - DNA, 25 bp, synthetic construct
  misc_feature 1..25: note = Oligonucleotide
  source 1..25: mol_type = other DNA
gtgcccacacacacatacaccccca

SEQ ID NO: 26482 - DNA, 25 bp, synthetic construct
  misc_feature 1..25: note = Oligonucleotide
  source 1..25: mol_type = other DNA
tgtgtgcccacacacacatacaccc

SEQ ID NO: 26483 - DNA, 25 bp, synthetic construct
  misc_feature 1..25: note = Oligonucleotide
  source 1..25: mol_type = other DNA
acctgtgtgcccacacacacataca

SEQ ID NO: 26484 - DNA, 25 bp, synthetic construct
  misc_feature 1..25: note = Oligonucleotide
  source 1..25: mol_type = other DNA
gtcacctgtgtgcccacacacacat

SEQ ID NO: 26485 - DNA, 25 bp, synthetic construct
  misc_feature 1..25: note = Oligonucleotide
  source 1..25: mol_type = other DNA
agggtcacctgtgtgcccacacaca

SEQ ID NO: 26486 - DNA, 25 bp, synthetic construct
  misc_feature 1..25: note = Oligonucleotide
  source 1..25: mol_type = other DNA
tacagggtcacctgtgtgcccacac

SEQ ID NO: 26487 - DNA, 25 bp, synthetic construct
  misc_feature 1..25: note = Oligonucleotide
  source 1..25: mol_type = other DNA
ccgtacagggtcacctgtgtgccca

SEQ ID NO: 26488 - DNA, 25 bp, synthetic construct
  misc_feature 1..25: note = Oligonucleotide
  source 1..25: mol_type = other DNA
tcaccgtacagggtcacctgtgtgc

SEQ ID NO: 26489 - DNA, 25 bp, synthetic construct
  misc_feature 1..25: note = Oligonucleotide
  source 1..25: mol_type = other DNA
caatcaccgtacagggtcacctgtg

SEQ ID NO: 26490 - DNA, 25 bp, synthetic construct
  misc_feature 1..25: note = Oligonucleotide
  source 1..25: mol_type = other DNA
atgcaatcaccgtacagggtcacct

SEQ ID NO: 26491 - DNA, 25 bp, synthetic construct
  misc_feature 1..25: note = Oligonucleotide
  source 1..25: mol_type = other DNA
cacatgcaatcaccgtacagggtca

SEQ ID NO: 26492 - DNA, 25 bp, synthetic construct
  misc_feature 1..25: note = Oligonucleotide
  source 1..25: mol_type = other DNA
gcacacatgcaatcaccgtacaggg

SEQ ID NO: 26493 - DNA, 25 bp, synthetic construct
  misc_feature 1..25: note = Oligonucleotide
  source 1..25: mol_type = other DNA
ggtgcacacatgcaatcaccgtaca

SEQ ID NO: 26494 - DNA, 25 bp, synthetic construct
  misc_feature 1..25: note = Oligonucleotide
  source 1..25: mol_type = other DNA
ctcggtgcacacatgcaatcaccgt

SEQ ID NO: 26495 - DNA, 25 bp, synthetic construct
  misc_feature 1..25: note = Oligonucleotide
  source 1..25: mol_type = other DNA
acactcggtgcacacatgcaatcac

SEQ ID NO: 26496 - DNA, 25 bp, synthetic construct
  misc_feature 1..25: note = Oligonucleotide
  source 1..25: mol_type = other DNA
tccacactcggtgcacacatgcaat

SEQ ID NO: 26497 - DNA, 25 bp, synthetic construct
  misc_feature 1..25: note = Oligonucleotide
  source 1..25: mol_type = other DNA
atatccacactcggtgcacacatgc

SEQ ID NO: 26498 - DNA, 25 bp, synthetic construct
  misc_feature 1..25: note = Oligonucleotide
  source 1..25: mol_type = other DNA
agtatatccacactcggtgcacaca

SEQ ID NO: 26499 - DNA, 25 bp, synthetic construct
  misc_feature 1..25: note = Oligonucleotide
  source 1..25: mol_type = other DNA
gcaagtatatccacactcggtgcac

SEQ ID NO: 26500 - DNA, 25 bp, synthetic construct
  misc_feature 1..25: note = Oligonucleotide
  source 1..25: mol_type = other DNA
caggcaagtatatccacactcggtg

SEQ ID NO: 26501 - DNA, 25 bp, synthetic construct
  misc_feature 1..25: note = Oligonucleotide
  source 1..25: mol_type = other DNA
gaacaggcaagtatatccacactcg

SEQ ID NO: 26502 - DNA, 25 bp, synthetic construct
  misc_feature 1..25: note = Oligonucleotide
  source 1..25: mol_type = other DNA
ccagaacaggcaagtatatccacac

SEQ ID NO: 26503 - DNA, 25 bp, synthetic construct
  misc_feature 1..25: note = Oligonucleotide
  source 1..25: mol_type = other DNA
cccccagaacaggcaagtatatcca

SEQ ID NO: 26504 - DNA, 25 bp, synthetic construct
  misc_feature 1..25: note = Oligonucleotide
  source 1..25: mol_type = other DNA
acacccccagaacaggcaagtatat

SEQ ID NO: 26505 - DNA, 25 bp, synthetic construct
  misc_feature 1..25: note = Oligonucleotide
  source 1..25: mol_type = other DNA
cgtacacccccagaacaggcaagta

SEQ ID NO: 26506 - DNA, 25 bp, synthetic construct
  misc_feature 1..25: note = Oligonucleotide
  source 1..25: mol_type = other DNA
acacgtacacccccagaacaggcaa

SEQ ID NO: 26507 - DNA, 25 bp, synthetic construct
  misc_feature 1..25: note = Oligonucleotide
  source 1..25: mol_type = other DNA
aacacacgtacacccccagaacagg

SEQ ID NO: 26508 - DNA, 25 bp, synthetic construct
  misc_feature 1..25: note = Oligonucleotide
  source 1..25: mol_type = other DNA
acaaacacacgtacacccccagaac

SEQ ID NO: 26509 - DNA, 25 bp, synthetic construct
  misc_feature 1..25: note = Oligonucleotide
  source 1..25: mol_type = other DNA
cacacaaacacacgtacacccccag

SEQ ID NO: 26510 - DNA, 25 bp, synthetic construct
  misc_feature 1..25: note = Oligonucleotide
  source 1..25: mol_type = other DNA
gtgcacacaaacacacgtacacccc

SEQ ID NO: 26511 - DNA, 25 bp, synthetic construct
  misc_feature 1..25: note = Oligonucleotide
  source 1..25: mol_type = other DNA
tgtgtgcacacaaacacacgtacac

SEQ ID NO: 26512 - DNA, 25 bp, synthetic construct
  misc_feature 1..25: note = Oligonucleotide
  source 1..25: mol_type = other DNA
acctgtgtgcacacaaacacacgta

SEQ ID NO: 26513 - DNA, 25 bp, synthetic construct
  misc_feature 1..25: note = Oligonucleotide
  source 1..25: mol_type = other DNA
gtcacctgtgtgcacacaaacacac

SEQ ID NO: 26514 - DNA, 25 bp, synthetic construct
  misc_feature 1..25: note = Oligonucleotide
  source 1..25: mol_type = other DNA
agggtcacctgtgtgcacacaaaca

SEQ ID NO: 26515 - DNA, 25 bp, synthetic construct
  misc_feature 1..25: note = Oligonucleotide
  source 1..25: mol_type = other DNA
tacagggtcacctgtgtgcacacaa

SEQ ID NO: 26516 - DNA, 25 bp, synthetic construct
  misc_feature 1..25: note = Oligonucleotide
  source 1..25: mol_type = other DNA
ctgtacagggtcacctgtgtgcaca

SEQ ID NO: 26517 - DNA, 25 bp, synthetic construct
  misc_feature 1..25: note = Oligonucleotide
  source 1..25: mol_type = other DNA
tcactgtacagggtcacctgtgtgc

SEQ ID NO: 26518 - DNA, 25 bp, synthetic construct
  misc_feature 1..25: note = Oligonucleotide
  source 1..25: mol_type = other DNA
caatcactgtacagggtcacctgtg

SEQ ID NO: 26519 - DNA, 25 bp, synthetic construct
  misc_feature 1..25: note = Oligonucleotide
  source 1..25: mol_type = other DNA
atgcaatcactgtacagggtcacct

SEQ ID NO: 26520 - DNA, 25 bp, synthetic construct
  misc_feature 1..25: note = Oligonucleotide
  source 1..25: mol_type = other DNA
cgcatgcaatcactgtacagggtca

SEQ ID NO: 26521 - DNA, 25 bp, synthetic construct
  misc_feature 1..25: note = Oligonucleotide
  source 1..25: mol_type = other DNA
gcacgcatgcaatcactgtacaggg

SEQ ID NO: 26522 - DNA, 25 bp, synthetic construct
  misc_feature 1..25: note = Oligonucleotide
  source 1..25: mol_type = other DNA
ggtgcacgcatgcaatcactgtaca

SEQ ID NO: 26523 - DNA, 25 bp, synthetic construct
  misc_feature 1..25: note = Oligonucleotide
  source 1..25: mol_type = other DNA
cctggtgcacgcatgcaatcactgt

SEQ ID NO: 26524 - DNA, 25 bp, synthetic construct
  misc_feature 1..25: note = Oligonucleotide
  source 1..25: mol_type = other DNA
ctccctggtgcacgcatgcaatcac

SEQ ID NO: 26525 - DNA, 25 bp, synthetic construct
  misc_feature 1..25: note = Oligonucleotide
  source 1..25: mol_type = other DNA
acactccctggtgcacgcatgcaat

SEQ ID NO: 26526 - DNA, 25 bp, synthetic construct
  misc_feature 1..25: note = Oligonucleotide
  source 1..25: mol_type = other DNA
tccacactccctggtgcacgcatgc

SEQ ID NO: 26527 - DNA, 25 bp, synthetic construct
  misc_feature 1..25: note = Oligonucleotide
  source 1..25: mol_type = other DNA
atatccacactccctggtgcacgca

SEQ ID NO: 26528 - DNA, 25 bp, synthetic construct
  misc_feature 1..25: note = Oligonucleotide
  source 1..25: mol_type = other DNA
agtatatccacactccctggtgcac

SEQ ID NO: 26529 - DNA, 25 bp, synthetic construct
  misc_feature 1..25: note = Oligonucleotide
  source 1..25: mol_type = other DNA
gcaagtatatccacactccctggtg

SEQ ID NO: 26530 - DNA, 25 bp, synthetic construct
  misc_feature 1..25: note = Oligonucleotide
  source 1..25: mol_type = other DNA
caggcaagtatatccacactccctg

SEQ ID NO: 26531 - DNA, 25 bp, synthetic construct
  misc_feature 1..25: note = Oligonucleotide
  source 1..25: mol_type = other DNA
gaacaggcaagtatatccacactcc

SEQ ID NO: 26532 - DNA, 25 bp, synthetic construct
  misc_feature 1..25: note = Oligonucleotide
  source 1..25: mol_type = other DNA
ccagaacaggcaagtatatccacac

SEQ ID NO: 26533 - DNA, 25 bp, synthetic construct
  misc_feature 1..25: note = Oligonucleotide
  source 1..25: mol_type = other DNA
accccagaacaggcaagtatatcca

SEQ ID NO: 26534 - DNA, 25 bp, synthetic construct
  misc_feature 1..25: note = Oligonucleotide
  source 1..25: mol_type = other DNA
acaaccccagaacaggcaagtatat

SEQ ID NO: 26535 - DNA, 25 bp, synthetic construct
  misc_feature 1..25: note = Oligonucleotide
  source 1..25: mol_type = other DNA
tgtacaaccccagaacaggcaagta

SEQ ID NO: 26536 - DNA, 25 bp, synthetic construct
  misc_feature 1..25: note = Oligonucleotide
  source 1..25: mol_type = other DNA
acatgtacaaccccagaacaggcaa

SEQ ID NO: 26537 - DNA, 25 bp, synthetic construct
  misc_feature 1..25: note = Oligonucleotide
  source 1..25: mol_type = other DNA
cacacatgtacaaccccagaacagg

SEQ ID NO: 26538 - DNA, 25 bp, synthetic construct
  misc_feature 1..25: note = Oligonucleotide
  source 1..25: mol_type = other DNA
gcacacacatgtacaaccccagaac

SEQ ID NO: 26539 - DNA, 25 bp, synthetic construct
  misc_feature 1..25: note = Oligonucleotide
  source 1..25: mol_type = other DNA
tgtgcacacacatgtacaaccccag

SEQ ID NO: 26540 - DNA, 25 bp, synthetic construct
  misc_feature 1..25: note = Oligonucleotide
  source 1..25: mol_type = other DNA
ctgtgtgcacacacatgtacaaccc

SEQ ID NO: 26541 - DNA, 25 bp, synthetic construct
  misc_feature 1..25: note = Oligonucleotide
  source 1..25: mol_type = other DNA
catctgtgtgcacacacatgtacaa

SEQ ID NO: 26542 - DNA, 25 bp, synthetic construct
  misc_feature 1..25: note = Oligonucleotide
  source 1..25: mol_type = other DNA
ggtcatctgtgtgcacacacatgta

SEQ ID NO: 26543 - DNA, 25 bp, synthetic construct
  misc_feature 1..25: note = Oligonucleotide
  source 1..25: mol_type = other DNA
cagggtcatctgtgtgcacacacat

SEQ ID NO: 26544 - DNA, 25 bp, synthetic construct
  misc_feature 1..25: note = Oligonucleotide
  source 1..25: mol_type = other DNA
gtacagggtcatctgtgtgcacaca

SEQ ID NO: 26545 - DNA, 25 bp, synthetic construct
  misc_feature 1..25: note = Oligonucleotide
  source 1..25: mol_type = other DNA
actgtacagggtcatctgtgtgcac

SEQ ID NO: 26546 - DNA, 25 bp, synthetic construct
  misc_feature 1..25: note = Oligonucleotide
  source 1..25: mol_type = other DNA
atcactgtacagggtcatctgtgtg

SEQ ID NO: 26547 - DNA, 25 bp, synthetic construct
  misc_feature 1..25: note = Oligonucleotide
  source 1..25: mol_type = other DNA
acaatcactgtacagggtcatctgt

SEQ ID NO: 26548 - DNA, 25 bp, synthetic construct
  misc_feature 1..25: note = Oligonucleotide
  source 1..25: mol_type = other DNA
catacaatcactgtacagggtcatc

SEQ ID NO: 26549 - DNA, 25 bp, synthetic construct
  misc_feature 1..25: note = Oligonucleotide
  source 1..25: mol_type = other DNA
acgcatacaatcactgtacagggtc

SEQ ID NO: 26550 - DNA, 25 bp, synthetic construct
  misc_feature 1..25: note = Oligonucleotide
  source 1..25: mol_type = other DNA
tgcacgcatacaatcactgtacagg

SEQ ID NO: 26551 - DNA, 25 bp, synthetic construct
  misc_feature 1..25: note = Oligonucleotide
  source 1..25: mol_type = other DNA
tggtgcacgcatacaatcactgtac

SEQ ID NO: 26552 - DNA, 25 bp, synthetic construct
  misc_feature 1..25: note = Oligonucleotide
  source 1..25: mol_type = other DNA
cactggtgcacgcatacaatcactg

SEQ ID NO: 26553 - DNA, 25 bp, synthetic construct
  misc_feature 1..25: note = Oligonucleotide
  source 1..25: mol_type = other DNA
actcactggtgcacgcatacaatca

SEQ ID NO: 26554 - DNA, 25 bp, synthetic construct
  misc_feature 1..25: note = Oligonucleotide
  source 1..25: mol_type = other DNA
cacactcactggtgcacgcatacaa

SEQ ID NO: 26555 - DNA, 25 bp, synthetic construct
  misc_feature 1..25: note = Oligonucleotide
  source 1..25: mol_type = other DNA
atccacactcactggtgcacgcata

SEQ ID NO: 26556 - DNA, 25 bp, synthetic construct
  misc_feature 1..25: note = Oligonucleotide
  source 1..25: mol_type = other DNA
tatatccacactcactggtgcacgc

SEQ ID NO: 26557 - DNA, 25 bp, synthetic construct
  misc_feature 1..25: note = Oligonucleotide
  source 1..25: mol_type = other DNA
aagtatatccacactcactggtgca

SEQ ID NO: 26558 - DNA, 25 bp, synthetic construct
  misc_feature 1..25: note = Oligonucleotide
  source 1..25: mol_type = other DNA
ggcaagtatatccacactcactggt

SEQ ID NO: 26559 - DNA, 25 bp, synthetic construct
  misc_feature 1..25: note = Oligonucleotide
  source 1..25: mol_type = other DNA
acaggcaagtatatccacactcact

SEQ ID NO: 26560 - DNA, 25 bp, synthetic construct
  misc_feature 1..25: note = Oligonucleotide
  source 1..25: mol_type = other DNA
agaacaggcaagtatatccacactc

SEQ ID NO: 26561 - DNA, 25 bp, synthetic construct
  misc_feature 1..25: note = Oligonucleotide
  source 1..25: mol_type = other DNA
cccagaacaggcaagtatatccaca

SEQ ID NO: 26562 - DNA, 25 bp, synthetic construct
  misc_feature 1..25: note = Oligonucleotide
  source 1..25: mol_type = other DNA
acccccagaacaggcaagtatatcc

SEQ ID NO: 26563 - DNA, 25 bp, synthetic construct
  misc_feature 1..25: note = Oligonucleotide
  source 1..25: mol_type = other DNA
tacacccccagaacaggcaagtata

SEQ ID NO: 26564 - DNA, 25 bp, synthetic construct
  misc_feature 1..25: note = Oligonucleotide
  source 1..25: mol_type = other DNA
acgtacacccccagaacaggcaagt

SEQ ID NO: 26565 - DNA, 25 bp, synthetic construct
  misc_feature 1..25: note = Oligonucleotide
  source 1..25: mol_type = other DNA
cacacgtacacccccagaacaggca

SEQ ID NO: 26566 - DNA, 25 bp, synthetic construct
  misc_feature 1..25: note = Oligonucleotide
  source 1..25: mol_type = other DNA
aaacacacgtacacccccagaacag

SEQ ID NO: 26567 - DNA, 25 bp, synthetic construct
  misc_feature 1..25: note = Oligonucleotide
  source 1..25: mol_type = other DNA
cacaaacacacgtacacccccagaa

SEQ ID NO: 26568 - DNA, 25 bp, synthetic construct
  misc_feature 1..25: note = Oligonucleotide
  source 1..25: mol_type = other DNA
gcacacaaacacacgtacaccccca

SEQ ID NO: 26569 - DNA, 25 bp, synthetic construct
  misc_feature 1..25: note = Oligonucleotide
  source 1..25: mol_type = other DNA
tgtgcacacaaacacacgtacaccc

SEQ ID NO: 26570 - DNA, 25 bp, synthetic construct
  misc_feature 1..25: note = Oligonucleotide
  source 1..25: mol_type = other DNA
ctgtgtgcacacaaacacacgtaca

SEQ ID NO: 26571 - DNA, 25 bp, synthetic construct
  misc_feature 1..25: note = Oligonucleotide
  source 1..25: mol_type = other DNA
cacctgtgtgcacacaaacacacgt

SEQ ID NO: 26572 - DNA, 25 bp, synthetic construct
  misc_feature 1..25: note = Oligonucleotide
  source 1..25: mol_type = other DNA
ggtcacctgtgtgcacacaaacaca

SEQ ID NO: 26573 - DNA, 25 bp, synthetic construct
  misc_feature 1..25: note = Oligonucleotide
  source 1..25: mol_type = other DNA
cagggtcacctgtgtgcacacaaac

SEQ ID NO: 26574 - DNA, 25 bp, synthetic construct
  misc_feature 1..25: note = Oligonucleotide
  source 1..25: mol_type = other DNA
gtacagggtcacctgtgtgcacaca

SEQ ID NO: 26575 - DNA, 25 bp, synthetic construct
  misc_feature 1..25: note = Oligonucleotide
  source 1..25: mol_type = other DNA
actgtacagggtcacctgtgtgcac

SEQ ID NO: 26576 - DNA, 25 bp, synthetic construct
  misc_feature 1..25: note = Oligonucleotide
  source 1..25: mol_type = other DNA
atcactgtacagggtcacctgtgtg

SEQ ID NO: 26577 - DNA, 25 bp, synthetic construct
  misc_feature 1..25: note = Oligonucleotide
  source 1..25: mol_type = other DNA
gcaatcactgtacagggtcacctgt

SEQ ID NO: 26578 - DNA, 25 bp, synthetic construct
  misc_feature 1..25: note = Oligonucleotide
  source 1..25: mol_type = other DNA
catgcaatcactgtacagggtcacc

SEQ ID NO: 26579 - DNA, 25 bp, synthetic construct
  misc_feature 1..25: note = Oligonucleotide
  source 1..25: mol_type = other DNA
acacatgcaatcactgtacagggtc

SEQ ID NO: 26580 - DNA, 25 bp, synthetic construct
  misc_feature 1..25: note = Oligonucleotide
  source 1..25: mol_type = other DNA
tgcacacatgcaatcactgtacagg

SEQ ID NO: 26581 - DNA, 25 bp, synthetic construct
  misc_feature 1..25: note = Oligonucleotide
  source 1..25: mol_type = other DNA
tggtgcacacatgcaatcactgtac

SEQ ID NO: 26582 - DNA, 25 bp, synthetic construct
  misc_feature 1..25: note = Oligonucleotide
  source 1..25: mol_type = other DNA
ccctggtgcacacatgcaatcactg

SEQ ID NO: 26583 - DNA, 25 bp, synthetic construct
  misc_feature 1..25: note = Oligonucleotide
  source 1..25: mol_type = other DNA
actccctggtgcacacatgcaatca

SEQ ID NO: 26584 - DNA, 25 bp, synthetic construct
  misc_feature 1..25: note = Oligonucleotide
  source 1..25: mol_type = other DNA
cacactccctggtgcacacatgcaa

SEQ ID NO: 26585 - DNA, 25 bp, synthetic construct
  misc_feature 1..25: note = Oligonucleotide
  source 1..25: mol_type = other DNA
atccacactccctggtgcacacatg

SEQ ID NO: 26586 - DNA, 25 bp, synthetic construct
  misc_feature 1..25: note = Oligonucleotide
  source 1..25: mol_type = other DNA
tatatccacactccctggtgcacac

SEQ ID NO: 26587 - DNA, 25 bp, synthetic construct
  misc_feature 1..25: note = Oligonucleotide
  source 1..25: mol_type = other DNA
aagtatatccacactccctggtgca

SEQ ID NO: 26588 - DNA, 25 bp, synthetic construct
  misc_feature 1..25: note = Oligonucleotide
  source 1..25: mol_type = other DNA
ggcaagtatatccacactccctggt

SEQ ID NO: 26589 - DNA, 25 bp, synthetic construct
  misc_feature 1..25: note = Oligonucleotide
  source 1..25: mol_type = other DNA
acaggcaagtatatccacactccct

SEQ ID NO: 26590 - DNA, 25 bp, synthetic construct
  misc_feature 1..25: note = Oligonucleotide
  source 1..25: mol_type = other DNA
agaacaggcaagtatatccacactc

SEQ ID NO: 26591 - DNA, 25 bp, synthetic construct
  misc_feature 1..25: note = Oligonucleotide
  source 1..25: mol_type = other DNA
cccagaacaggcaagtatatccaca

SEQ ID NO: 26592 - DNA, 25 bp, synthetic construct
  misc_feature 1..25: note = Oligonucleotide
  source 1..25: mol_type = other DNA
acccccagaacaggcaagtatatcc

SEQ ID NO: 26593 - DNA, 25 bp, synthetic construct
  misc_feature 1..25: note = Oligonucleotide
  source 1..25: mol_type = other DNA
tacacccccagaacaggcaagtata

SEQ ID NO: 26594 - DNA, 25 bp, synthetic construct
  misc_feature 1..25: note = Oligonucleotide
  source 1..25: mol_type = other DNA
gtgtacacccccagaacaggcaagt

SEQ ID NO: 26595 - DNA, 25 bp, synthetic construct
  misc_feature 1..25: note = Oligonucleotide
  source 1..25: mol_type = other DNA
cacgtgtacacccccagaacaggca

SEQ ID NO: 26596 - DNA, 25 bp, synthetic construct
  misc_feature 1..25: note = Oligonucleotide
  source 1..25: mol_type = other DNA
acacacgtgtacacccccagaacag

SEQ ID NO: 26597 - DNA, 25 bp, synthetic construct
  misc_feature 1..25: note = Oligonucleotide
  source 1..25: mol_type = other DNA
caaacacacgtgtacacccccagaa

SEQ ID NO: 26598 - DNA, 25 bp, synthetic construct
  misc_feature 1..25: note = Oligonucleotide
  source 1..25: mol_type = other DNA
gtgcaaacacacgtgtacaccccca

SEQ ID NO: 26599 - DNA, 25 bp, synthetic construct
  misc_feature 1..25: note = Oligonucleotide
  source 1..25: mol_type = other DNA
tgtgtgcaaacacacgtgtacaccc

SEQ ID NO: 26600 - DNA, 25 bp, synthetic construct
  misc_feature 1..25: note = Oligonucleotide
  source 1..25: mol_type = other DNA
atctgtgtgcaaacacacgtgtaca

SEQ ID NO: 26601 - DNA, 25 bp, synthetic construct
  misc_feature 1..25: note = Oligonucleotide
  source 1..25: mol_type = other DNA
gtcatctgtgtgcaaacacacgtgt

SEQ ID NO: 26602 - DNA, 25 bp, synthetic construct
  misc_feature 1..25: note = Oligonucleotide
  source 1..25: mol_type = other DNA
agggtcatctgtgtgcaaacacacg

SEQ ID NO: 26603 - DNA, 25 bp, synthetic construct
  misc_feature 1..25: note = Oligonucleotide
  source 1..25: mol_type = other DNA
tacagggtcatctgtgtgcaaacac

SEQ ID NO: 26604 - DNA, 25 bp, synthetic construct
  misc_feature 1..25: note = Oligonucleotide
  source 1..25: mol_type = other DNA
ctgtacagggtcatctgtgtgcaaa

SEQ ID NO: 26605 - DNA, 25 bp, synthetic construct
  misc_feature 1..25: note = Oligonucleotide
  source 1..25: mol_type = other DNA
tcactgtacagggtcatctgtgtgc

SEQ ID NO: 26606 - DNA, 25 bp, synthetic construct
  misc_feature 1..25: note = Oligonucleotide
  source 1..25: mol_type = other DNA
caatcactgtacagggtcatctgtg

SEQ ID NO: 26607 - DNA, 25 bp, synthetic construct
  misc_feature 1..25: note = Oligonucleotide
  source 1..25: mol_type = other DNA
atgcaatcactgtacagggtcatct

SEQ ID NO: 26608 - DNA, 25 bp, synthetic construct
  misc_feature 1..25: note = Oligonucleotide
  source 1..25: mol_type = other DNA
cgcatgcaatcactgtacagggtca

SEQ ID NO: 26609 - DNA, 25 bp, synthetic construct
  misc_feature 1..25: note = Oligonucleotide
  source 1..25: mol_type = other DNA
gcacgcatgcaatcactgtacaggg

SEQ ID NO: 26610 - DNA, 25 bp, synthetic construct
  misc_feature 1..25: note = Oligonucleotide
  source 1..25: mol_type = other DNA
ggtgcacgcatgcaatcactgtaca

SEQ ID NO: 26611 - DNA, 25 bp, synthetic construct
  misc_feature 1..25: note = Oligonucleotide
  source 1..25: mol_type = other DNA
cctggtgcacgcatgcaatcactgt

SEQ ID NO: 26612 - DNA, 25 bp, synthetic construct
  misc_feature 1..25: note = Oligonucleotide
  source 1..25: mol_type = other DNA
ctccctggtgcacgcatgcaatcac

SEQ ID NO: 26613 - DNA, 25 bp, synthetic construct
  misc_feature 1..25: note = Oligonucleotide
  source 1..25: mol_type = other DNA
acactccctggtgcacgcatgcaat

SEQ ID NO: 26614 - DNA, 25 bp, synthetic construct
  misc_feature 1..25: note = Oligonucleotide
  source 1..25: mol_type = other DNA
tccacactccctggtgcacgcatgc

SEQ ID NO: 26615 - DNA, 25 bp, synthetic construct
  misc_feature 1..25: note = Oligonucleotide
  source 1..25: mol_type = other DNA
atatccacactccctggtgcacgca

SEQ ID NO: 26616 - DNA, 25 bp, synthetic construct
  misc_feature 1..25: note = Oligonucleotide
  source 1..25: mol_type = other DNA
agtatatccacactccctggtgcac

SEQ ID NO: 26617 - DNA, 25 bp, synthetic construct
  misc_feature 1..25: note = Oligonucleotide
  source 1..25: mol_type = other DNA
gcaagtatatccacactccctggtg

SEQ ID NO: 26618 - DNA, 25 bp, synthetic construct
  misc_feature 1..25: note = Oligonucleotide
  source 1..25: mol_type = other DNA
caggcaagtatatccacactccctg

SEQ ID NO: 26619 - DNA, 25 bp, synthetic construct
  misc_feature 1..25: note = Oligonucleotide
  source 1..25: mol_type = other DNA
gaacaggcaagtatatccacactcc

SEQ ID NO: 26620 - DNA, 25 bp, synthetic construct
  misc_feature 1..25: note = Oligonucleotide
  source 1..25: mol_type = other DNA
ccagaacaggcaagtatatccacac

SEQ ID NO: 26621 - DNA, 25 bp, synthetic construct
  misc_feature 1..25: note = Oligonucleotide
  source 1..25: mol_type = other DNA
cccccagaacaggcaagtatatcca

SEQ ID NO: 26622 - DNA, 25 bp, synthetic construct
  misc_feature 1..25: note = Oligonucleotide
  source 1..25: mol_type = other DNA
acacccccagaacaggcaagtatat

SEQ ID NO: 26623 - DNA, 25 bp, synthetic construct
  misc_feature 1..25: note = Oligonucleotide
  source 1..25: mol_type = other DNA
tgtacacccccagaacaggcaagta

SEQ ID NO: 26624 - DNA, 25 bp, synthetic construct
  misc_feature 1..25: note = Oligonucleotide
  source 1..25: mol_type = other DNA
acgtgtacacccccagaacaggcaa

SEQ ID NO: 26625 - DNA, 25 bp, synthetic construct
  misc_feature 1..25: note = Oligonucleotide
  source 1..25: mol_type = other DNA
cacacgtgtacacccccagaacagg

SEQ ID NO: 26626 - DNA, 25 bp, synthetic construct
  misc_feature 1..25: note = Oligonucleotide
  source 1..25: mol_type = other DNA
acacacacgtgtacacccccagaac

SEQ ID NO: 26627 - DNA, 25 bp, synthetic construct
  misc_feature 1..25: note = Oligonucleotide
  source 1..25: mol_type = other DNA
tgcacacacacgtgtacacccccag

SEQ ID NO: 26628 - DNA, 25 bp, synthetic construct
  misc_feature 1..25: note = Oligonucleotide
  source 1..25: mol_type = other DNA
gtgtgcacacacacgtgtacacccc

SEQ ID NO: 26629 - DNA, 25 bp, synthetic construct
  misc_feature 1..25: note = Oligonucleotide
  source 1..25: mol_type = other DNA
tctgtgtgcacacacacgtgtacac

SEQ ID NO: 26630 - DNA, 25 bp, synthetic construct
  misc_feature 1..25: note = Oligonucleotide
  source 1..25: mol_type = other DNA
tcatctgtgtgcacacacacgtgta

SEQ ID NO: 26631 - DNA, 25 bp, synthetic construct
  misc_feature 1..25: note = Oligonucleotide
  source 1..25: mol_type = other DNA
gggtcatctgtgtgcacacacacgt

SEQ ID NO: 26632 - DNA, 25 bp, synthetic construct
  misc_feature 1..25: note = Oligonucleotide
  source 1..25: mol_type = other DNA
acagggtcatctgtgtgcacacaca

SEQ ID NO: 26633 - DNA, 25 bp, synthetic construct
  misc_feature 1..25: note = Oligonucleotide
  source 1..25: mol_type = other DNA
tgtacagggtcatctgtgtgcacac

SEQ ID NO: 26634 - DNA, 25 bp, synthetic construct
  misc_feature 1..25: note = Oligonucleotide
  source 1..25: mol_type = other DNA
cactgtacagggtcatctgtgtgca

SEQ ID NO: 26635 - DNA, 25 bp, synthetic construct
  misc_feature 1..25: note = Oligonucleotide
  source 1..25: mol_type = other DNA
aatcactgtacagggtcatctgtgt

SEQ ID NO: 26636 - DNA, 25 bp, synthetic construct
  misc_feature 1..25: note = Oligonucleotide
  source 1..25: mol_type = other DNA
tgcaatcactgtacagggtcatctg

SEQ ID NO: 26637 - DNA, 25 bp, synthetic construct
  misc_feature 1..25: note = Oligonucleotide
  source 1..25: mol_type = other DNA
gcatgcaatcactgtacagggtcat

SEQ ID NO: 26638 - DNA, 25 bp, synthetic construct
  misc_feature 1..25: note = Oligonucleotide
  source 1..25: mol_type = other DNA
cacgcatgcaatcactgtacagggt

SEQ ID NO: 26639 - DNA, 25 bp, synthetic construct
  misc_feature 1..25: note = Oligonucleotide
  source 1..25: mol_type = other DNA
gtgcacgcatgcaatcactgtacag

SEQ ID NO: 26640 - DNA, 25 bp, synthetic construct
  misc_feature 1..25: note = Oligonucleotide
  source 1..25: mol_type = other DNA
ctggtgcacgcatgcaatcactgta

SEQ ID NO: 26641 - DNA, 25 bp, synthetic construct
  misc_feature 1..25: note = Oligonucleotide
  source 1..25: mol_type = other DNA
tacctggtgcacgcatgcaatcact

SEQ ID NO: 26642 - DNA, 25 bp, synthetic construct
  misc_feature 1..25: note = Oligonucleotide
  source 1..25: mol_type = other DNA
cactacctggtgcacgcatgcaatc

SEQ ID NO: 26643 - DNA, 25 bp, synthetic construct
  misc_feature 1..25: note = Oligonucleotide
  source 1..25: mol_type = other DNA
ccacactacctggtgcacgcatgca

SEQ ID NO: 26644 - DNA, 25 bp, synthetic construct
  misc_feature 1..25: note = Oligonucleotide
  source 1..25: mol_type = other DNA
tatccacactacctggtgcacgcat

SEQ ID NO: 26645 - DNA, 25 bp, synthetic construct
  misc_feature 1..25: note = Oligonucleotide
  source 1..25: mol_type = other DNA
gtatatccacactacctggtgcacg

SEQ ID NO: 26646 - DNA, 25 bp, synthetic construct
  misc_feature 1..25: note = Oligonucleotide
  source 1..25: mol_type = other DNA
caagtatatccacactacctggtgc

SEQ ID NO: 26647 - DNA, 25 bp, synthetic construct
  misc_feature 1..25: note = Oligonucleotide
  source 1..25: mol_type = other DNA
aggcaagtatatccacactacctgg

SEQ ID NO: 26648 - DNA, 25 bp, synthetic construct
  misc_feature 1..25: note = Oligonucleotide
  source 1..25: mol_type = other DNA
aacaggcaagtatatccacactacc

SEQ ID NO: 26649 - DNA, 25 bp, synthetic construct
  misc_feature 1..25: note = Oligonucleotide
  source 1..25: mol_type = other DNA
cagaacaggcaagtatatccacact

SEQ ID NO: 26650 - DNA, 25 bp, synthetic construct
  misc_feature 1..25: note = Oligonucleotide
  source 1..25: mol_type = other DNA
ccccagaacaggcaagtatatccac

SEQ ID NO: 26651 - DNA, 25 bp, synthetic construct
  misc_feature 1..25: note = Oligonucleotide
  source 1..25: mol_type = other DNA
cacccccagaacaggcaagtatatc

SEQ ID NO: 26652 - DNA, 25 bp, synthetic construct
  misc_feature 1..25: note = Oligonucleotide
  source 1..25: mol_type = other DNA
gtacacccccagaacaggcaagtat

SEQ ID NO: 26653 - DNA, 25 bp, synthetic construct
  misc_feature 1..25: note = Oligonucleotide
  source 1..25: mol_type = other DNA
cgtgtacacccccagaacaggcaag

SEQ ID NO: 26654 - DNA, 25 bp, synthetic construct
  misc_feature 1..25: note = Oligonucleotide
  source 1..25: mol_type = other DNA
acacgtgtacacccccagaacaggc

SEQ ID NO: 26655 - DNA, 25 bp, synthetic construct
  misc_feature 1..25: note = Oligonucleotide
  source 1..25: mol_type = other DNA
aacacacgtgtacacccccagaaca

SEQ ID NO: 26656 - DNA, 25 bp, synthetic construct
  misc_feature 1..25: note = Oligonucleotide
  source 1..25: mol_type = other DNA
gcaaacacacgtgtacacccccaga

SEQ ID NO: 26657 - DNA, 25 bp, synthetic construct
  misc_feature 1..25: note = Oligonucleotide
  source 1..25: mol_type = other DNA
tgtgcaaacacacgtgtacaccccc

SEQ ID NO: 26658 - DNA, 25 bp, synthetic construct
  misc_feature 1..25: note = Oligonucleotide
  source 1..25: mol_type = other DNA
ctgtgtgcaaacacacgtgtacacc

SEQ ID NO: 26659 - DNA, 25 bp, synthetic construct
  misc_feature 1..25: note = Oligonucleotide
  source 1..25: mol_type = other DNA
catctgtgtgcaaacacacgtgtac

SEQ ID NO: 26660 - DNA, 25 bp, synthetic construct
  misc_feature 1..25: note = Oligonucleotide
  source 1..25: mol_type = other DNA
ggtcatctgtgtgcaaacacacgtg

SEQ ID NO: 26661 - DNA, 25 bp, synthetic construct
  misc_feature 1..25: note = Oligonucleotide
  source 1..25: mol_type = other DNA
caaggtcatctgtgtgcaaacacac

SEQ ID NO: 26662 - DNA, 25 bp, synthetic construct
  misc_feature 1..25: note = Oligonucleotide
  source 1..25: mol_type = other DNA
gtacaaggtcatctgtgtgcaaaca

SEQ ID NO: 26663 - DNA, 25 bp, synthetic construct
  misc_feature 1..25: note = Oligonucleotide
  source 1..25: mol_type = other DNA
actgtacaaggtcatctgtgtgcaa

SEQ ID NO: 26664 - DNA, 25 bp, synthetic construct
  misc_feature 1..25: note = Oligonucleotide
  source 1..25: mol_type = other DNA
atcactgtacaaggtcatctgtgtg

SEQ ID NO: 26665 - DNA, 25 bp, synthetic construct
  misc_feature 1..25: note = Oligonucleotide
  source 1..25: mol_type = other DNA
gcaatcactgtacaaggtcatctgt

SEQ ID NO: 26666 - DNA, 25 bp, synthetic construct
  misc_feature 1..25: note = Oligonucleotide
  source 1..25: mol_type = other DNA
catgcaatcactgtacaaggtcatc

SEQ ID NO: 26667 - DNA, 25 bp, synthetic construct
  misc_feature 1..25: note = Oligonucleotide
  source 1..25: mol_type = other DNA
acgcatgcaatcactgtacaaggtc

SEQ ID NO: 26668 - DNA, 25 bp, synthetic construct
  misc_feature 1..25: note = Oligonucleotide
  source 1..25: mol_type = other DNA
tgcacgcatgcaatcactgtacaag

SEQ ID NO: 26669 - DNA, 25 bp, synthetic construct
  misc_feature 1..25: note = Oligonucleotide
  source 1..25: mol_type = other DNA
tggtgcacgcatgcaatcactgtac

SEQ ID NO: 26670 - DNA, 25 bp, synthetic construct
  misc_feature 1..25: note = Oligonucleotide
  source 1..25: mol_type = other DNA
ccctggtgcacgcatgcaatcactg

SEQ ID NO: 26671 - DNA, 25 bp, synthetic construct
  misc_feature 1..25: note = Oligonucleotide
  source 1..25: mol_type = other DNA
actccctggtgcacgcatgcaatca

SEQ ID NO: 26672 - DNA, 25 bp, synthetic construct
  misc_feature 1..25: note = Oligonucleotide
  source 1..25: mol_type = other DNA
cacactccctggtgcacgcatgcaa

SEQ ID NO: 26673 - DNA, 25 bp, synthetic construct
  misc_feature 1..25: note = Oligonucleotide
  source 1..25: mol_type = other DNA
atccacactccctggtgcacgcatg

SEQ ID NO: 26674 - DNA, 25 bp, synthetic construct
  misc_feature 1..25: note = Oligonucleotide
  source 1..25: mol_type = other DNA
tatatccacactccctggtgcacgc

SEQ ID NO: 26675 - DNA, 25 bp, synthetic construct
  misc_feature 1..25: note = Oligonucleotide
  source 1..25: mol_type = other DNA
aagtatatccacactccctggtgca

SEQ ID NO: 26676 - DNA, 25 bp, synthetic construct
  misc_feature 1..25: note = Oligonucleotide
  source 1..25: mol_type = other DNA
gacaagtatatccacactccctggt

SEQ ID NO: 26677 - DNA, 25 bp, synthetic construct
  misc_feature 1..25: note = Oligonucleotide
  source 1..25: mol_type = other DNA
acagacaagtatatccacactccct

SEQ ID NO: 26678 - DNA, 25 bp, synthetic construct
  misc_feature 1..25: note = Oligonucleotide
  source 1..25: mol_type = other DNA
agaacagacaagtatatccacactc

SEQ ID NO: 26679 - DNA, 25 bp, synthetic construct
  misc_feature 1..25: note = Oligonucleotide
  source 1..25: mol_type = other DNA
cccagaacagacaagtatatccaca

SEQ ID NO: 26680 - DNA, 25 bp, synthetic construct
  misc_feature 1..25: note = Oligonucleotide
  source 1..25: mol_type = other DNA
acccccagaacagacaagtatatcc

SEQ ID NO: 26681 - DNA, 25 bp, synthetic construct
  misc_feature 1..25: note = Oligonucleotide
  source 1..25: mol_type = other DNA
tacacccccagaacagacaagtata

SEQ ID NO: 26682 - DNA, 25 bp, synthetic construct
  misc_feature 1..25: note = Oligonucleotide
  source 1..25: mol_type = other DNA
gtgtacacccccagaacagacaagt

SEQ ID NO: 26683 - DNA, 25 bp, synthetic construct
  misc_feature 1..25: note = Oligonucleotide
  source 1..25: mol_type = other DNA
cacgtgtacacccccagaacagaca

SEQ ID NO: 26684 - DNA, 25 bp, synthetic construct
  misc_feature 1..25: note = Oligonucleotide
  source 1..25: mol_type = other DNA
acacacgtgtacacccccagaacag

SEQ ID NO: 26685 - DNA, 25 bp, synthetic construct
  misc_feature 1..25: note = Oligonucleotide
  source 1..25: mol_type = other DNA
caaacacacgtgtacacccccagaa

SEQ ID NO: 26686 - DNA, 25 bp, synthetic construct
  misc_feature 1..25: note = Oligonucleotide
  source 1..25: mol_type = other DNA
gtgcaaacacacgtgtacaccccca

SEQ ID NO: 26687 - DNA, 25 bp, synthetic construct
  misc_feature 1..25: note = Oligonucleotide
  source 1..25: mol_type = other DNA
tgtgtgcaaacacacgtgtacaccc

SEQ ID NO: 26688 - DNA, 25 bp, synthetic construct
  misc_feature 1..25: note = Oligonucleotide
  source 1..25: mol_type = other DNA
atctgtgtgcaaacacacgtgtaca

SEQ ID NO: 26689 - DNA, 25 bp, synthetic construct
  misc_feature 1..25: note = Oligonucleotide
  source 1..25: mol_type = other DNA
gtcatctgtgtgcaaacacacgtgt

SEQ ID NO: 26690 - DNA, 25 bp, synthetic construct
  misc_feature 1..25: note = Oligonucleotide
  source 1..25: mol_type = other DNA
agggtcatctgtgtgcaaacacacg

SEQ ID NO: 26691 - DNA, 25 bp, synthetic construct
  misc_feature 1..25: note = Oligonucleotide
  source 1..25: mol_type = other DNA
tacagggtcatctgtgtgcaaacac

SEQ ID NO: 26692 - DNA, 25 bp, synthetic construct
  misc_feature 1..25: note = Oligonucleotide
  source 1..25: mol_type = other DNA
ctgtacagggtcatctgtgtgcaaa

SEQ ID NO: 26693 - DNA, 25 bp, synthetic construct
  misc_feature 1..25: note = Oligonucleotide
  source 1..25: mol_type = other DNA
tcactgtacagggtcatctgtgtgc

SEQ ID NO: 26694 - DNA, 25 bp, synthetic construct
  misc_feature 1..25: note = Oligonucleotide
  source 1..25: mol_type = other DNA
caatcactgtacagggtcatctgtg

SEQ ID NO: 26695 - DNA, 25 bp, synthetic construct
  misc_feature 1..25: note = Oligonucleotide
  source 1..25: mol_type = other DNA
atgcaatcactgtacagggtcatct

SEQ ID NO: 26696 - DNA, 25 bp, synthetic construct
  misc_feature 1..25: note = Oligonucleotide
  source 1..25: mol_type = other DNA
cgcatgcaatcactgtacagggtca

SEQ ID NO: 26697 - DNA, 25 bp, synthetic construct
  misc_feature 1..25: note = Oligonucleotide
  source 1..25: mol_type = other DNA
gcacgcatgcaatcactgtacaggg

SEQ ID NO: 26698 - DNA, 25 bp, synthetic construct
  misc_feature 1..25: note = Oligonucleotide
  source 1..25: mol_type = other DNA
ggtgcacgcatgcaatcactgtaca

SEQ ID NO: 26699 - DNA, 25 bp, synthetic construct
  misc_feature 1..25: note = Oligonucleotide
  source 1..25: mol_type = other DNA
cctggtgcacgcatgcaatcactgt

SEQ ID NO: 26700 - DNA, 25 bp, synthetic construct
  misc_feature 1..25: note = Oligonucleotide
  source 1..25: mol_type = other DNA
ctccctggtgcacgcatgcaatcac

SEQ ID NO: 26701 - DNA, 25 bp, synthetic construct
  misc_feature 1..25: note = Oligonucleotide
  source 1..25: mol_type = other DNA
acactccctggtgcacgcatgcaat

SEQ ID NO: 26702 - DNA, 25 bp, synthetic construct
  misc_feature 1..25: note = Oligonucleotide
  source 1..25: mol_type = other DNA
tccacactccctggtgcacgcatgc

SEQ ID NO: 26703 - DNA, 25 bp, synthetic construct
  misc_feature 1..25: note = Oligonucleotide
  source 1..25: mol_type = other DNA
atatccacactccctggtgcacgca

SEQ ID NO: 26704 - DNA, 25 bp, synthetic construct
  misc_feature 1..25: note = Oligonucleotide
  source 1..25: mol_type = other DNA
agtatatccacactccctggtgcac

SEQ ID NO: 26705 - DNA, 25 bp, synthetic construct
  misc_feature 1..25: note = Oligonucleotide
  source 1..25: mol_type = other DNA
gcaagtatatccacactccctggtg

SEQ ID NO: 26706 - DNA, 25 bp, synthetic construct
  misc_feature 1..25: note = Oligonucleotide
  source 1..25: mol_type = other DNA
caggcaagtatatccacactccctg

SEQ ID NO: 26707 - DNA, 25 bp, synthetic construct
  misc_feature 1..25: note = Oligonucleotide
  source 1..25: mol_type = other DNA
gaacaggcaagtatatccacactcc

SEQ ID NO: 26708 - DNA, 25 bp, synthetic construct
  misc_feature 1..25: note = Oligonucleotide
  source 1..25: mol_type = other DNA
ccagaacaggcaagtatatccacac

SEQ ID NO: 26709 - DNA, 25 bp, synthetic construct
  misc_feature 1..25: note = Oligonucleotide
  source 1..25: mol_type = other DNA
cccccagaacaggcaagtatatcca

SEQ ID NO: 26710 - DNA, 25 bp, synthetic construct
  misc_feature 1..25: note = Oligonucleotide
  source 1..25: mol_type = other DNA
acacccccagaacaggcaagtatat

SEQ ID NO: 26711 - DNA, 25 bp, synthetic construct
  misc_feature 1..25: note = Oligonucleotide
  source 1..25: mol_type = other DNA
tgtacacccccagaacaggcaagta

SEQ ID NO: 26712 - DNA, 25 bp, synthetic construct
  misc_feature 1..25: note = Oligonucleotide
  source 1..25: mol_type = other DNA
acgtgtacacccccagaacaggcaa

SEQ ID NO: 26713 - DNA, 25 bp, synthetic construct
  misc_feature 1..25: note = Oligonucleotide
  source 1..25: mol_type = other DNA
cacacgtgtacacccccagaacagg

SEQ ID NO: 26714 - DNA, 25 bp, synthetic construct
  misc_feature 1..25: note = Oligonucleotide
  source 1..25: mol_type = other DNA
aaacacacgtgtacacccccagaac

SEQ ID NO: 26715 - DNA, 25 bp, synthetic construct
  misc_feature 1..25: note = Oligonucleotide
  source 1..25: mol_type = other DNA
tgcaaacacacgtgtacacccccag

SEQ ID NO: 26716 - DNA, 25 bp, synthetic construct
  misc_feature 1..25: note = Oligonucleotide
  source 1..25: mol_type = other DNA
gtgtgcaaacacacgtgtacacccc

SEQ ID NO: 26717 - DNA, 25 bp, synthetic construct
  misc_feature 1..25: note = Oligonucleotide
  source 1..25: mol_type = other DNA
cctgtgtgcaaacacacgtgtacac

SEQ ID NO: 26718 - DNA, 25 bp, synthetic construct
  misc_feature 1..25: note = Oligonucleotide
  source 1..25: mol_type = other DNA
tcacctgtgtgcaaacacacgtgta

SEQ ID NO: 26719 - DNA, 25 bp, synthetic construct
  misc_feature 1..25: note = Oligonucleotide
  source 1..25: mol_type = other DNA
gggtcacctgtgtgcaaacacacgt

SEQ ID NO: 26720 - DNA, 25 bp, synthetic construct
  misc_feature 1..25: note = Oligonucleotide
  source 1..25: mol_type = other DNA
acagggtcacctgtgtgcaaacaca

SEQ ID NO: 26721 - DNA, 25 bp, synthetic construct
  misc_feature 1..25: note = Oligonucleotide
  source 1..25: mol_type = other DNA
tgtacagggtcacctgtgtgcaaac

SEQ ID NO: 26722 - DNA, 25 bp, synthetic construct
  misc_feature 1..25: note = Oligonucleotide
  source 1..25: mol_type = other DNA
cactgtacagggtcacctgtgtgca

SEQ ID NO: 26723 - DNA, 25 bp, synthetic construct
  misc_feature 1..25: note = Oligonucleotide
  source 1..25: mol_type = other DNA
gatcactgtacagggtcacctgtgt

SEQ ID NO: 26724 - DNA, 25 bp, synthetic construct
  misc_feature 1..25: note = Oligonucleotide
  source 1..25: mol_type = other DNA
tacgatcactgtacagggtcacctg

SEQ ID NO: 26725 - DNA, 25 bp, synthetic construct
  misc_feature 1..25: note = Oligonucleotide
  source 1..25: mol_type = other DNA
gtgtacgatcactgtacagggtcac

SEQ ID NO: 26726 - DNA, 25 bp, synthetic construct
  misc_feature 1..25: note = Oligonucleotide
  source 1..25: mol_type = other DNA
cacgtgtacgatcactgtacagggt

SEQ ID NO: 26727 - DNA, 25 bp, synthetic construct
  misc_feature 1..25: note = Oligonucleotide
  source 1..25: mol_type = other DNA
gtacacgtgtacgatcactgtacag

SEQ ID NO: 26728 - DNA, 25 bp, synthetic construct
  misc_feature 1..25: note = Oligonucleotide
  source 1..25: mol_type = other DNA
ctggtacacgtgtacgatcactgta

SEQ ID NO: 26729 - DNA, 25 bp, synthetic construct
  misc_feature 1..25: note = Oligonucleotide
  source 1..25: mol_type = other DNA
tccctggtacacgtgtacgatcact

SEQ ID NO: 26730 - DNA, 25 bp, synthetic construct
  misc_feature 1..25: note = Oligonucleotide
  source 1..25: mol_type = other DNA
cactccctggtacacgtgtacgatc

SEQ ID NO: 26731 - DNA, 25 bp, synthetic construct
  misc_feature 1..25: note = Oligonucleotide
  source 1..25: mol_type = other DNA
ccacactccctggtacacgtgtacg

SEQ ID NO: 26732 - DNA, 25 bp, synthetic construct
  misc_feature 1..25: note = Oligonucleotide
  source 1..25: mol_type = other DNA
tatccacactccctggtacacgtgt

SEQ ID NO: 26733 - DNA, 25 bp, synthetic construct
  misc_feature 1..25: note = Oligonucleotide
  source 1..25: mol_type = other DNA
gtatatccacactccctggtacacg

SEQ ID NO: 26734 - DNA, 25 bp, synthetic construct
  misc_feature 1..25: note = Oligonucleotide
  source 1..25: mol_type = other DNA
caagtatatccacactccctggtac

SEQ ID NO: 26735 - DNA, 25 bp, synthetic construct
  misc_feature 1..25: note = Oligonucleotide
  source 1..25: mol_type = other DNA
aggcaagtatatccacactccctgg

SEQ ID NO: 26736 - DNA, 25 bp, synthetic construct
  misc_feature 1..25: note = Oligonucleotide
  source 1..25: mol_type = other DNA
aacaggcaagtatatccacactccc

SEQ ID NO: 26737 - DNA, 25 bp, synthetic construct
  misc_feature 1..25: note = Oligonucleotide
  source 1..25: mol_type = other DNA
cagaacaggcaagtatatccacact

SEQ ID NO: 26738 - DNA, 25 bp, synthetic construct
  misc_feature 1..25: note = Oligonucleotide
  source 1..25: mol_type = other DNA
ccccagaacaggcaagtatatccac

SEQ ID NO: 26739 - DNA, 25 bp, synthetic construct
  misc_feature 1..25: note = Oligonucleotide
  source 1..25: mol_type = other DNA
caaccccagaacaggcaagtatatc

SEQ ID NO: 26740 - DNA, 25 bp, synthetic construct
  misc_feature 1..25: note = Oligonucleotide
  source 1..25: mol_type = other DNA
gtacaaccccagaacaggcaagtat

SEQ ID NO: 26741 - DNA, 25 bp, synthetic construct
  misc_feature 1..25: note = Oligonucleotide
  source 1..25: mol_type = other DNA
cacgtacaaccccagaacaggcaag

SEQ ID NO: 26742 - DNA, 25 bp, synthetic construct
  misc_feature 1..25: note = Oligonucleotide
  source 1..25: mol_type = other DNA
acacacgtacaaccccagaacaggc

SEQ ID NO: 26743 - DNA, 25 bp, synthetic construct
  misc_feature 1..25: note = Oligonucleotide
  source 1..25: mol_type = other DNA
cacacacacgtacaaccccagaaca

SEQ ID NO: 26744 - DNA, 25 bp, synthetic construct
  misc_feature 1..25: note = Oligonucleotide
  source 1..25: mol_type = other DNA
gcacacacacacgtacaaccccaga

SEQ ID NO: 26745 - DNA, 25 bp, synthetic construct
  misc_feature 1..25: note = Oligonucleotide
  source 1..25: mol_type = other DNA
tgtgcacacacacacgtacaacccc

SEQ ID NO: 26746 - DNA, 25 bp, synthetic construct
  misc_feature 1..25: note = Oligonucleotide
  source 1..25: mol_type = other DNA
ctgtgtgcacacacacacgtacaac

SEQ ID NO: 26747 - DNA, 25 bp, synthetic construct
  misc_feature 1..25: note = Oligonucleotide
  source 1..25: mol_type = other DNA
catctgtgtgcacacacacacgtac

SEQ ID NO: 26748 - DNA, 25 bp, synthetic construct
  misc_feature 1..25: note = Oligonucleotide
  source 1..25: mol_type = other DNA
agtcatctgtgtgcacacacacacg

SEQ ID NO: 26749 - DNA, 25 bp, synthetic construct
  misc_feature 1..25: note = Oligonucleotide
  source 1..25: mol_type = other DNA
cagagtcatctgtgtgcacacacac

SEQ ID NO: 26750 - DNA, 25 bp, synthetic construct
  misc_feature 1..25: note = Oligonucleotide
  source 1..25: mol_type = other DNA
gtacagagtcatctgtgtgcacaca

SEQ ID NO: 26751 - DNA, 25 bp, synthetic construct
  misc_feature 1..25: note = Oligonucleotide
  source 1..25: mol_type = other DNA
actgtacagagtcatctgtgtgcac

SEQ ID NO: 26752 - DNA, 25 bp, synthetic construct
  misc_feature 1..25: note = Oligonucleotide
  source 1..25: mol_type = other DNA
atcactgtacagagtcatctgtgtg

SEQ ID NO: 26753 - DNA, 25 bp, synthetic construct
  misc_feature 1..25: note = Oligonucleotide
  source 1..25: mol_type = other DNA
gcaatcactgtacagagtcatctgt

SEQ ID NO: 26754 - DNA, 25 bp, synthetic construct
  misc_feature 1..25: note = Oligonucleotide
  source 1..25: mol_type = other DNA
catgcaatcactgtacagagtcatc

SEQ ID NO: 26755 - DNA, 25 bp, synthetic construct
  misc_feature 1..25: note = Oligonucleotide
  source 1..25: mol_type = other DNA
acgcatgcaatcactgtacagagtc

SEQ ID NO: 26756 - DNA, 25 bp, synthetic construct
  misc_feature 1..25: note = Oligonucleotide
  source 1..25: mol_type = other DNA
tgcacgcatgcaatcactgtacaga

SEQ ID NO: 26757 - DNA, 25 bp, synthetic construct
  misc_feature 1..25: note = Oligonucleotide
  source 1..25: mol_type = other DNA
tggtgcacgcatgcaatcactgtac

SEQ ID NO: 26758 - DNA, 25 bp, synthetic construct
  misc_feature 1..25: note = Oligonucleotide
  source 1..25: mol_type = other DNA
acctggtgcacgcatgcaatcactg

SEQ ID NO: 26759 - DNA, 25 bp, synthetic construct
  misc_feature 1..25: note = Oligonucleotide
  source 1..25: mol_type = other DNA
actacctggtgcacgcatgcaatca

SEQ ID NO: 26760 - DNA, 25 bp, synthetic construct
  misc_feature 1..25: note = Oligonucleotide
  source 1..25: mol_type = other DNA
cacactacctggtgcacgcatgcaa

SEQ ID NO: 26761 - DNA, 25 bp, synthetic construct
  misc_feature 1..25: note = Oligonucleotide
  source 1..25: mol_type = other DNA
atccacactacctggtgcacgcatg

SEQ ID NO: 26762 - DNA, 25 bp, synthetic construct
  misc_feature 1..25: note = Oligonucleotide
  source 1..25: mol_type = other DNA
tatatccacactacctggtgcacgc

SEQ ID NO: 26763 - DNA, 25 bp, synthetic construct
  misc_feature 1..25: note = Oligonucleotide
  source 1..25: mol_type = other DNA
aagtatatccacactacctggtgca

SEQ ID NO: 26764 - DNA, 25 bp, synthetic construct
  misc_feature 1..25: note = Oligonucleotide
  source 1..25: mol_type = other DNA
gacaagtatatccacactacctggt

SEQ ID NO: 26765 - DNA, 25 bp, synthetic construct
  misc_feature 1..25: note = Oligonucleotide
  source 1..25: mol_type = other DNA
acagacaagtatatccacactacct

SEQ ID NO: 26766 - DNA, 25 bp, synthetic construct
  misc_feature 1..25: note = Oligonucleotide
  source 1..25: mol_type = other DNA
agaacagacaagtatatccacacta

SEQ ID NO: 26767 - DNA, 25 bp, synthetic construct
  misc_feature 1..25: note = Oligonucleotide
  source 1..25: mol_type = other DNA
cccagaacagacaagtatatccaca

SEQ ID NO: 26768 - DNA, 25 bp, synthetic construct
  misc_feature 1..25: note = Oligonucleotide
  source 1..25: mol_type = other DNA
acccccagaacagacaagtatatcc

SEQ ID NO: 26769 - DNA, 25 bp, synthetic construct
  misc_feature 1..25: note = Oligonucleotide
  source 1..25: mol_type = other DNA
tacacccccagaacagacaagtata

SEQ ID NO: 26770 - DNA, 25 bp, synthetic construct
  misc_feature 1..25: note = Oligonucleotide
  source 1..25: mol_type = other DNA
gtgtacacccccagaacagacaagt

SEQ ID NO: 26771 - DNA, 25 bp, synthetic construct
  misc_feature 1..25: note = Oligonucleotide
  source 1..25: mol_type = other DNA
cacgtgtacacccccagaacagaca

SEQ ID NO: 26772 - DNA, 25 bp, synthetic construct
  misc_feature 1..25: note = Oligonucleotide
  source 1..25: mol_type = other DNA
acacacgtgtacacccccagaacag

SEQ ID NO: 26773 - DNA, 25 bp, synthetic construct
  misc_feature 1..25: note = Oligonucleotide
  source 1..25: mol_type = other DNA
caaacacacgtgtacacccccagaa

SEQ ID NO: 26774 - DNA, 25 bp, synthetic construct
  misc_feature 1..25: note = Oligonucleotide
  source 1..25: mol_type = other DNA
gtgcaaacacacgtgtacaccccca

SEQ ID NO: 26775 - DNA, 25 bp, synthetic construct
  misc_feature 1..25: note = Oligonucleotide
  source 1..25: mol_type = other DNA
tgtgtgcaaacacacgtgtacaccc

SEQ ID NO: 26776 - DNA, 25 bp, synthetic construct
  misc_feature 1..25: note = Oligonucleotide
  source 1..25: mol_type = other DNA
atctgtgtgcaaacacacgtgtaca

SEQ ID NO: 26777 - DNA, 25 bp, synthetic construct
  misc_feature 1..25: note = Oligonucleotide
  source 1..25: mol_type = other DNA
gtcatctgtgtgcaaacacacgtgt

SEQ ID NO: 26778 - DNA, 25 bp, synthetic construct
  misc_feature 1..25: note = Oligonucleotide
  source 1..25: mol_type = other DNA
aaggtcatctgtgtgcaaacacacg

SEQ ID NO: 26779 - DNA, 25 bp, synthetic construct
  misc_feature 1..25: note = Oligonucleotide
  source 1..25: mol_type = other DNA
tacaaggtcatctgtgtgcaaacac

SEQ ID NO: 26780 - DNA, 25 bp, synthetic construct
  misc_feature 1..25: note = Oligonucleotide
  source 1..25: mol_type = other DNA
ctgtacaaggtcatctgtgtgcaaa

SEQ ID NO: 26781 - DNA, 25 bp, synthetic construct
  misc_feature 1..25: note = Oligonucleotide
  source 1..25: mol_type = other DNA
tcactgtacaaggtcatctgtgtgc

SEQ ID NO: 26782 - DNA, 25 bp, synthetic construct
  misc_feature 1..25: note = Oligonucleotide
  source 1..25: mol_type = other DNA
caatcactgtacaaggtcatctgtg

SEQ ID NO: 26783 - DNA, 25 bp, synthetic construct
  misc_feature 1..25: note = Oligonucleotide
  source 1..25: mol_type = other DNA
atgcaatcactgtacaaggtcatct

SEQ ID NO: 26784 - DNA, 25 bp, synthetic construct
  misc_feature 1..25: note = Oligonucleotide
  source 1..25: mol_type = other DNA
cgcatgcaatcactgtacaaggtca

SEQ ID NO: 26785 - DNA, 25 bp, synthetic construct
  misc_feature 1..25: note = Oligonucleotide
  source 1..25: mol_type = other DNA
gcacgcatgcaatcactgtacaagg

SEQ ID NO: 26786 - DNA, 25 bp, synthetic construct
  misc_feature 1..25: note = Oligonucleotide
  source 1..25: mol_type = other DNA
ggtgcacgcatgcaatcactgtaca

SEQ ID NO: 26787 - DNA, 25 bp, synthetic construct
  misc_feature 1..25: note = Oligonucleotide
  source 1..25: mol_type = other DNA
cctggtgcacgcatgcaatcactgt

SEQ ID NO: 26788 - DNA, 25 bp, synthetic construct
  misc_feature 1..25: note = Oligonucleotide
  source 1..25: mol_type = other DNA
ctccctggtgcacgcatgcaatcac

SEQ ID NO: 26789 - DNA, 25 bp, synthetic construct
  misc_feature 1..25: note = Oligonucleotide
  source 1..25: mol_type = other DNA
acactccctggtgcacgcatgcaat

SEQ ID NO: 26790 - DNA, 25 bp, synthetic construct
  misc_feature 1..25: note = Oligonucleotide
  source 1..25: mol_type = other DNA
tccacactccctggtgcacgcatgc

SEQ ID NO: 26791 - DNA, 25 bp, synthetic construct
  misc_feature 1..25: note = Oligonucleotide
  source 1..25: mol_type = other DNA
atatccacactccctggtgcacgca

SEQ ID NO: 26792 - DNA, 25 bp, synthetic construct
  misc_feature 1..25: note = Oligonucleotide
  source 1..25: mol_type = other DNA
agtatatccacactccctggtgcac

SEQ ID NO: 26793 - DNA, 25 bp, synthetic construct
  misc_feature 1..25: note = Oligonucleotide
  source 1..25: mol_type = other DNA
gcaagtatatccacactccctggtg

SEQ ID NO: 26794 - DNA, 25 bp, synthetic construct
  misc_feature 1..25: note = Oligonucleotide
  source 1..25: mol_type = other DNA
caggcaagtatatccacactccctg

SEQ ID NO: 26795 - DNA, 25 bp, synthetic construct
  misc_feature 1..25: note = Oligonucleotide
  source 1..25: mol_type = other DNA
gaacaggcaagtatatccacactcc

SEQ ID NO: 26796 - DNA, 25 bp, synthetic construct
  misc_feature 1..25: note = Oligonucleotide
  source 1..25: mol_type = other DNA
ccagaacaggcaagtatatccacac

SEQ ID NO: 26797 - DNA, 25 bp, synthetic construct
  misc_feature 1..25: note = Oligonucleotide
  source 1..25: mol_type = other DNA
cccccagaacaggcaagtatatcca

SEQ ID NO: 26798 - DNA, 25 bp, synthetic construct
  misc_feature 1..25: note = Oligonucleotide
  source 1..25: mol_type = other DNA
acacccccagaacaggcaagtatat

SEQ ID NO: 26799 - DNA, 25 bp, synthetic construct
  misc_feature 1..25: note = Oligonucleotide
  source 1..25: mol_type = other DNA
tgtacacccccagaacaggcaagta

SEQ ID NO: 26800 - DNA, 25 bp, synthetic construct
  misc_feature 1..25: note = Oligonucleotide
  source 1..25: mol_type = other DNA
acatgtacacccccagaacaggcaa

SEQ ID NO: 26801 - DNA, 25 bp, synthetic construct
  misc_feature 1..25: note = Oligonucleotide
  source 1..25: mol_type = other DNA
cacacatgtacacccccagaacagg

SEQ ID NO: 26802 - DNA, 25 bp, synthetic construct
  misc_feature 1..25: note = Oligonucleotide
  source 1..25: mol_type = other DNA
gcacacacatgtacacccccagaac

SEQ ID NO: 26803 - DNA, 25 bp, synthetic construct
  misc_feature 1..25: note = Oligonucleotide
  source 1..25: mol_type = other DNA
tgtgcacacacatgtacacccccag

SEQ ID NO: 26804 - DNA, 25 bp, synthetic construct
  misc_feature 1..25: note = Oligonucleotide
  source 1..25: mol_type = other DNA
ctgtgtgcacacacatgtacacccc

SEQ ID NO: 26805 - DNA, 25 bp, synthetic construct
  misc_feature 1..25: note = Oligonucleotide
  source 1..25: mol_type = other DNA
catctgtgtgcacacacatgtacac

SEQ ID NO: 26806 - DNA, 25 bp, synthetic construct
  misc_feature 1..25: note = Oligonucleotide
  source 1..25: mol_type = other DNA
ggtcatctgtgtgcacacacatgta

SEQ ID NO: 26807 - DNA, 25 bp, synthetic construct
  misc_feature 1..25: note = Oligonucleotide
  source 1..25: mol_type = other DNA
cagggtcatctgtgtgcacacacat

SEQ ID NO: 26808 - DNA, 25 bp, synthetic construct
  misc_feature 1..25: note = Oligonucleotide
  source 1..25: mol_type = other DNA
gtacagggtcatctgtgtgcacaca

SEQ ID NO: 26809 - DNA, 25 bp, synthetic construct
  misc_feature 1..25: note = Oligonucleotide
  source 1..25: mol_type = other DNA
actgtacagggtcatctgtgtgcac

SEQ ID NO: 26810 - DNA, 25 bp, synthetic construct
  misc_feature 1..25: note = Oligonucleotide
  source 1..25: mol_type = other DNA
atcactgtacagggtcatctgtgtg

SEQ ID NO: 26811 - DNA, 25 bp, synthetic construct
  misc_feature 1..25: note = Oligonucleotide
  source 1..25: mol_type = other DNA
gcaatcactgtacagggtcatctgt

SEQ ID NO: 26812 - DNA, 25 bp, synthetic construct
  misc_feature 1..25: note = Oligonucleotide
  source 1..25: mol_type = other DNA
catgcaatcactgtacagggtcatc

SEQ ID NO: 26813 - DNA, 25 bp, synthetic construct
  misc_feature 1..25: note = Oligonucleotide
  source 1..25: mol_type = other DNA
acgcatgcaatcactgtacagggtc

SEQ ID NO: 26814 - DNA, 25 bp, synthetic construct
  misc_feature 1..25: note = Oligonucleotide
  source 1..25: mol_type = other DNA
tgcacgcatgcaatcactgtacagg

SEQ ID NO: 26815 - DNA, 25 bp, synthetic construct
  misc_feature 1..25: note = Oligonucleotide
  source 1..25: mol_type = other DNA
tggtgcacgcatgcaatcactgtac

SEQ ID NO: 26816 - DNA, 25 bp, synthetic construct
  misc_feature 1..25: note = Oligonucleotide
  source 1..25: mol_type = other DNA
ccctggtgcacgcatgcaatcactg

SEQ ID NO: 26817 - DNA, 25 bp, synthetic construct
  misc_feature 1..25: note = Oligonucleotide
  source 1..25: mol_type = other DNA
actccctggtgcacgcatgcaatca

SEQ ID NO: 26818 - DNA, 25 bp, synthetic construct
  misc_feature 1..25: note = Oligonucleotide
  source 1..25: mol_type = other DNA
cacactccctggtgcacgcatgcaa

SEQ ID NO: 26819 - DNA, 25 bp, synthetic construct
  misc_feature 1..25: note = Oligonucleotide
  source 1..25: mol_type = other DNA
atccacactccctggtgcacgcatg

SEQ ID NO: 26820 - DNA, 25 bp, synthetic construct
  misc_feature 1..25: note = Oligonucleotide
  source 1..25: mol_type = other DNA
tatatccacactccctggtgcacgc

SEQ ID NO: 26821 - DNA, 25 bp, synthetic construct
  misc_feature 1..25: note = Oligonucleotide
  source 1..25: mol_type = other DNA
aagtatatccacactccctggtgca

SEQ ID NO: 26822 - DNA, 25 bp, synthetic construct
  misc_feature 1..25: note = Oligonucleotide
  source 1..25: mol_type = other DNA
ggcaagtatatccacactccctggt

SEQ ID NO: 26823 - DNA, 25 bp, synthetic construct
  misc_feature 1..25: note = Oligonucleotide
  source 1..25: mol_type = other DNA
acaggcaagtatatccacactccct

SEQ ID NO: 26824 - DNA, 25 bp, synthetic construct
  misc_feature 1..25: note = Oligonucleotide
  source 1..25: mol_type = other DNA
agaacaggcaagtatatccacactc

SEQ ID NO: 26825 - DNA, 25 bp, synthetic construct
  misc_feature 1..25: note = Oligonucleotide
  source 1..25: mol_type = other DNA
cccagaacaggcaagtatatccaca

SEQ ID NO: 26826 - DNA, 25 bp, synthetic construct
  misc_feature 1..25: note = Oligonucleotide
  source 1..25: mol_type = other DNA
acccccagaacaggcaagtatatcc

SEQ ID NO: 26827 - DNA, 25 bp, synthetic construct
  misc_feature 1..25: note = Oligonucleotide
  source 1..25: mol_type = other DNA
tacacccccagaacaggcaagtata

SEQ ID NO: 26828 - DNA, 25 bp, synthetic construct
  misc_feature 1..25: note = Oligonucleotide
  source 1..25: mol_type = other DNA
gtgtacacccccagaacaggcaagt

SEQ ID NO: 26829 - DNA, 25 bp, synthetic construct
  misc_feature 1..25: note = Oligonucleotide
  source 1..25: mol_type = other DNA
cacgtgtacacccccagaacaggca

SEQ ID NO: 26830 - DNA, 25 bp, synthetic construct
  misc_feature 1..25: note = Oligonucleotide
  source 1..25: mol_type = other DNA
acacacgtgtacacccccagaacag

SEQ ID NO: 26831 - DNA, 25 bp, synthetic construct
  misc_feature 1..25: note = Oligonucleotide
  source 1..25: mol_type = other DNA
caaacacacgtgtacacccccagaa

SEQ ID NO: 26832 - DNA, 25 bp, synthetic construct
  misc_feature 1..25: note = Oligonucleotide
  source 1..25: mol_type = other DNA
gtgcaaacacacgtgtacaccccca

SEQ ID NO: 26833 - DNA, 25 bp, synthetic construct
  misc_feature 1..25: note = Oligonucleotide
  source 1..25: mol_type = other DNA
tgtgtgcaaacacacgtgtacaccc

SEQ ID NO: 26834 - DNA, 25 bp, synthetic construct
  misc_feature 1..25: note = Oligonucleotide
  source 1..25: mol_type = other DNA
acctgtgtgcaaacacacgtgtaca

SEQ ID NO: 26835 - DNA, 25 bp, synthetic construct
  misc_feature 1..25: note = Oligonucleotide
  source 1..25: mol_type = other DNA
gtcacctgtgtgcaaacacacgtgt

SEQ ID NO: 26836 - DNA, 25 bp, synthetic construct
  misc_feature 1..25: note = Oligonucleotide
  source 1..25: mol_type = other DNA
agggtcacctgtgtgcaaacacacg

SEQ ID NO: 26837 - DNA, 25 bp, synthetic construct
  misc_feature 1..25: note = Oligonucleotide
  source 1..25: mol_type = other DNA
tacagggtcacctgtgtgcaaacac

SEQ ID NO: 26838 - DNA, 25 bp, synthetic construct
  misc_feature 1..25: note = Oligonucleotide
  source 1..25: mol_type = other DNA
ctgtacagggtcacctgtgtgcaaa

SEQ ID NO: 26839 - DNA, 25 bp, synthetic construct
  misc_feature 1..25: note = Oligonucleotide
  source 1..25: mol_type = other DNA
tcactgtacagggtcacctgtgtgc

SEQ ID NO: 26840 - DNA, 25 bp, synthetic construct
  misc_feature 1..25: note = Oligonucleotide
  source 1..25: mol_type = other DNA
caatcactgtacagggtcacctgtg

SEQ ID NO: 26841 - DNA, 25 bp, synthetic construct
  misc_feature 1..25: note = Oligonucleotide
  source 1..25: mol_type = other DNA
gtacaatcactgtacagggtcacct

SEQ ID NO: 26842 - DNA, 25 bp, synthetic construct
  misc_feature 1..25: note = Oligonucleotide
  source 1..25: mol_type = other DNA
cgtgtacaatcactgtacagggtca

SEQ ID NO: 26843 - DNA, 25 bp, synthetic construct
  misc_feature 1..25: note = Oligonucleotide
  source 1..25: mol_type = other DNA
acacgtgtacaatcactgtacaggg

SEQ ID NO: 26844 - DNA, 25 bp, synthetic construct
  misc_feature 1..25: note = Oligonucleotide
  source 1..25: mol_type = other DNA
ggtacacgtgtacaatcactgtaca

SEQ ID NO: 26845 - DNA, 25 bp, synthetic construct
  misc_feature 1..25: note = Oligonucleotide
  source 1..25: mol_type = other DNA
cctggtacacgtgtacaatcactgt

SEQ ID NO: 26846 - DNA, 25 bp, synthetic construct
  misc_feature 1..25: note = Oligonucleotide
  source 1..25: mol_type = other DNA
ctccctggtacacgtgtacaatcac

SEQ ID NO: 26847 - DNA, 25 bp, synthetic construct
  misc_feature 1..25: note = Oligonucleotide
  source 1..25: mol_type = other DNA
acactccctggtacacgtgtacaat

SEQ ID NO: 26848 - DNA, 25 bp, synthetic construct
  misc_feature 1..25: note = Oligonucleotide
  source 1..25: mol_type = other DNA
tccacactccctggtacacgtgtac

SEQ ID NO: 26849 - DNA, 25 bp, synthetic construct
  misc_feature 1..25: note = Oligonucleotide
  source 1..25: mol_type = other DNA
atatccacactccctggtacacgtg

SEQ ID NO: 26850 - DNA, 25 bp, synthetic construct
  misc_feature 1..25: note = Oligonucleotide
  source 1..25: mol_type = other DNA
agtatatccacactccctggtacac

SEQ ID NO: 26851 - DNA, 25 bp, synthetic construct
  misc_feature 1..25: note = Oligonucleotide
  source 1..25: mol_type = other DNA
gcaagtatatccacactccctggta

SEQ ID NO: 26852 - DNA, 25 bp, synthetic construct
  misc_feature 1..25: note = Oligonucleotide
  source 1..25: mol_type = other DNA
caggcaagtatatccacactccctg

SEQ ID NO: 26853 - DNA, 25 bp, synthetic construct
  misc_feature 1..25: note = Oligonucleotide
  source 1..25: mol_type = other DNA
gaacaggcaagtatatccacactcc

SEQ ID NO: 26854 - DNA, 25 bp, synthetic construct
  misc_feature 1..25: note = Oligonucleotide
  source 1..25: mol_type = other DNA
ccagaacaggcaagtatatccacac

SEQ ID NO: 26855 - DNA, 25 bp, synthetic construct
  misc_feature 1..25: note = Oligonucleotide
  source 1..25: mol_type = other DNA
accccagaacaggcaagtatatcca

SEQ ID NO: 26856 - DNA, 25 bp, synthetic construct
  misc_feature 1..25: note = Oligonucleotide
  source 1..25: mol_type = other DNA
acaaccccagaacaggcaagtatat

SEQ ID NO: 26857 - DNA, 25 bp, synthetic construct
  misc_feature 1..25: note = Oligonucleotide
  source 1..25: mol_type = other DNA
cgtacaaccccagaacaggcaagta

SEQ ID NO: 26858 - DNA, 25 bp, synthetic construct
  misc_feature 1..25: note = Oligonucleotide
  source 1..25: mol_type = other DNA
acacgtacaaccccagaacaggcaa

SEQ ID NO: 26859 - DNA, 25 bp, synthetic construct
  misc_feature 1..25: note = Oligonucleotide
  source 1..25: mol_type = other DNA
cacacacgtacaaccccagaacagg

SEQ ID NO: 26860 - DNA, 25 bp, synthetic construct
  misc_feature 1..25: note = Oligonucleotide
  source 1..25: mol_type = other DNA
acacacacacgtacaaccccagaac

SEQ ID NO: 26861 - DNA, 25 bp, synthetic construct
  misc_feature 1..25: note = Oligonucleotide
  source 1..25: mol_type = other DNA
tgcacacacacacgtacaaccccag

SEQ ID NO: 26862 - DNA, 25 bp, synthetic construct
  misc_feature 1..25: note = Oligonucleotide
  source 1..25: mol_type = other DNA
gtgtgcacacacacacgtacaaccc

SEQ ID NO: 26863 - DNA, 25 bp, synthetic construct
  misc_feature 1..25: note = Oligonucleotide
  source 1..25: mol_type = other DNA
tctgtgtgcacacacacacgtacaa

SEQ ID NO: 26864 - DNA, 25 bp, synthetic construct
  misc_feature 1..25: note = Oligonucleotide
  source 1..25: mol_type = other DNA
tcatctgtgtgcacacacacacgta

SEQ ID NO: 26865 - DNA, 25 bp, synthetic construct
  misc_feature 1..25: note = Oligonucleotide
  source 1..25: mol_type = other DNA
gagtcatctgtgtgcacacacacac

SEQ ID NO: 26866 - DNA, 25 bp, synthetic construct
  misc_feature 1..25: note = Oligonucleotide
  source 1..25: mol_type = other DNA
acagagtcatctgtgtgcacacaca

SEQ ID NO: 26867 - DNA, 25 bp, synthetic construct
  misc_feature 1..25: note = Oligonucleotide
  source 1..25: mol_type = other DNA
tgtacagagtcatctgtgtgcacac

SEQ ID NO: 26868 - DNA, 25 bp, synthetic construct
  misc_feature 1..25: note = Oligonucleotide
  source 1..25: mol_type = other DNA
cactgtacagagtcatctgtgtgca

SEQ ID NO: 26869 - DNA, 25 bp, synthetic construct
  misc_feature 1..25: note = Oligonucleotide
  source 1..25: mol_type = other DNA
aatcactgtacagagtcatctgtgt

SEQ ID NO: 26870 - DNA, 25 bp, synthetic construct
  misc_feature 1..25: note = Oligonucleotide
  source 1..25: mol_type = other DNA
tgcaatcactgtacagagtcatctg

SEQ ID NO: 26871 - DNA, 25 bp, synthetic construct
  misc_feature 1..25: note = Oligonucleotide
  source 1..25: mol_type = other DNA
gcatgcaatcactgtacagagtcat

SEQ ID NO: 26872 - DNA, 25 bp, synthetic construct
  misc_feature 1..25: note = Oligonucleotide
  source 1..25: mol_type = other DNA
cacgcatgcaatcactgtacagagt

SEQ ID NO: 26873 - DNA, 25 bp, synthetic construct
  misc_feature 1..25: note = Oligonucleotide
  source 1..25: mol_type = other DNA
gtgcacgcatgcaatcactgtacag

SEQ ID NO: 26874 - DNA, 25 bp, synthetic construct
  misc_feature 1..25: note = Oligonucleotide
  source 1..25: mol_type = other DNA
ctggtgcacgcatgcaatcactgta

SEQ ID NO: 26875 - DNA, 25 bp, synthetic construct
  misc_feature 1..25: note = Oligonucleotide
  source 1..25: mol_type = other DNA
tacctggtgcacgcatgcaatcact

SEQ ID NO: 26876 - DNA, 25 bp, synthetic construct
  misc_feature 1..25: note = Oligonucleotide
  source 1..25: mol_type = other DNA
cactacctggtgcacgcatgcaatc

SEQ ID NO: 26877 - DNA, 25 bp, synthetic construct
  misc_feature 1..25: note = Oligonucleotide
  source 1..25: mol_type = other DNA
ccacactacctggtgcacgcatgca

SEQ ID NO: 26878 - DNA, 25 bp, synthetic construct
  misc_feature 1..25: note = Oligonucleotide
  source 1..25: mol_type = other DNA
tatccacactacctggtgcacgcat

SEQ ID NO: 26879 - DNA, 25 bp, synthetic construct
  misc_feature 1..25: note = Oligonucleotide
  source 1..25: mol_type = other DNA
gtatatccacactacctggtgcacg

SEQ ID NO: 26880 - DNA, 25 bp, synthetic construct
  misc_feature 1..25: note = Oligonucleotide
  source 1..25: mol_type = other DNA
caagtatatccacactacctggtgc

SEQ ID NO: 26881 - DNA, 25 bp, synthetic construct
  misc_feature 1..25: note = Oligonucleotide
  source 1..25: mol_type = other DNA
agacaagtatatccacactacctgg

SEQ ID NO: 26882 - DNA, 25 bp, synthetic construct
  misc_feature 1..25: note = Oligonucleotide
  source 1..25: mol_type = other DNA
aacagacaagtatatccacactacc

SEQ ID NO: 26883 - DNA, 25 bp, synthetic construct
  misc_feature 1..25: note = Oligonucleotide
  source 1..25: mol_type = other DNA
cagaacagacaagtatatccacact

SEQ ID NO: 26884 - DNA, 25 bp, synthetic construct
  misc_feature 1..25: note = Oligonucleotide
  source 1..25: mol_type = other DNA
ccccagaacagacaagtatatccac

SEQ ID NO: 26885 - DNA, 25 bp, synthetic construct
  misc_feature 1..25: note = Oligonucleotide
  source 1..25: mol_type = other DNA
cacccccagaacagacaagtatatc

SEQ ID NO: 26886 - DNA, 25 bp, synthetic construct
  misc_feature 1..25: note = Oligonucleotide
  source 1..25: mol_type = other DNA
gtacacccccagaacagacaagtat

SEQ ID NO: 26887 - DNA, 25 bp, synthetic construct
  misc_feature 1..25: note = Oligonucleotide
  source 1..25: mol_type = other DNA
cgtgtacacccccagaacagacaag

SEQ ID NO: 26888 - DNA, 25 bp, synthetic construct
  misc_feature 1..25: note = Oligonucleotide
  source 1..25: mol_type = other DNA
acacgtgtacacccccagaacagac

SEQ ID NO: 26889 - DNA, 25 bp, synthetic construct
  misc_feature 1..25: note = Oligonucleotide
  source 1..25: mol_type = other DNA
aacacacgtgtacacccccagaaca

SEQ ID NO: 26890 - DNA, 25 bp, synthetic construct
  misc_feature 1..25: note = Oligonucleotide
  source 1..25: mol_type = other DNA
gcaaacacacgtgtacacccccaga

SEQ ID NO: 26891 - DNA, 25 bp, synthetic construct
  misc_feature 1..25: note = Oligonucleotide
  source 1..25: mol_type = other DNA
tgtgcaaacacacgtgtacaccccc

SEQ ID NO: 26892 - DNA, 25 bp, synthetic construct
  misc_feature 1..25: note = Oligonucleotide
  source 1..25: mol_type = other DNA
ctgtgtgcaaacacacgtgtacacc

SEQ ID NO: 26893 - DNA, 25 bp, synthetic construct
  misc_feature 1..25: note = Oligonucleotide
  source 1..25: mol_type = other DNA
catctgtgtgcaaacacacgtgtac

SEQ ID NO: 26894 - DNA, 25 bp, synthetic construct
  misc_feature 1..25: note = Oligonucleotide
  source 1..25: mol_type = other DNA
ggtcatctgtgtgcaaacacacgtg

SEQ ID NO: 26895 - DNA, 25 bp, synthetic construct
  misc_feature 1..25: note = Oligonucleotide
  source 1..25: mol_type = other DNA
caaggtcatctgtgtgcaaacacac

SEQ ID NO: 26896 - DNA, 25 bp, synthetic construct
  misc_feature 1..25: note = Oligonucleotide
  source 1..25: mol_type = other DNA
gtacaaggtcatctgtgtgcaaaca

SEQ ID NO: 26897 - DNA, 25 bp, synthetic construct
  misc_feature 1..25: note = Oligonucleotide
  source 1..25: mol_type = other DNA
actgtacaaggtcatctgtgtgcaa

SEQ ID NO: 26898 - DNA, 25 bp, synthetic construct
  misc_feature 1..25: note = Oligonucleotide
  source 1..25: mol_type = other DNA
atcactgtacaaggtcatctgtgtg

SEQ ID NO: 26899 - DNA, 25 bp, synthetic construct
  misc_feature 1..25: note = Oligonucleotide
  source 1..25: mol_type = other DNA
gcaatcactgtacaaggtcatctgt

SEQ ID NO: 26900 - DNA, 25 bp, synthetic construct
  misc_feature 1..25: note = Oligonucleotide
  source 1..25: mol_type = other DNA
catgcaatcactgtacaaggtcatc

SEQ ID NO: 26901 - DNA, 25 bp, synthetic construct
  misc_feature 1..25: note = Oligonucleotide
  source 1..25: mol_type = other DNA
acgcatgcaatcactgtacaaggtc

SEQ ID NO: 26902 - DNA, 25 bp, synthetic construct
  misc_feature 1..25: note = Oligonucleotide
  source 1..25: mol_type = other DNA
tgcacgcatgcaatcactgtacaag

SEQ ID NO: 26903 - DNA, 25 bp, synthetic construct
  misc_feature 1..25: note = Oligonucleotide
  source 1..25: mol_type = other DNA
tggtgcacgcatgcaatcactgtac

SEQ ID NO: 26904 - DNA, 25 bp, synthetic construct
  misc_feature 1..25: note = Oligonucleotide
  source 1..25: mol_type = other DNA
ccctggtgcacgcatgcaatcactg

SEQ ID NO: 26905 - DNA, 25 bp, synthetic construct
  misc_feature 1..25: note = Oligonucleotide
  source 1..25: mol_type = other DNA
actccctggtgcacgcatgcaatca

SEQ ID NO: 26906 - DNA, 25 bp, synthetic construct
  misc_feature 1..25: note = Oligonucleotide
  source 1..25: mol_type = other DNA
cacactccctggtgcacgcatgcaa

SEQ ID NO: 26907 - DNA, 25 bp, synthetic construct
  misc_feature 1..25: note = Oligonucleotide
  source 1..25: mol_type = other DNA
atccacactccctggtgcacgcatg

SEQ ID NO: 26908 - DNA, 25 bp, synthetic construct
  misc_feature 1..25: note = Oligonucleotide
  source 1..25: mol_type = other DNA
tatatccacactccctggtgcacgc

SEQ ID NO: 26909 - DNA, 25 bp, synthetic construct
  misc_feature 1..25: note = Oligonucleotide
  source 1..25: mol_type = other DNA
aagtatatccacactccctggtgca

SEQ ID NO: 26910 - DNA, 25 bp, synthetic construct
  misc_feature 1..25: note = Oligonucleotide
  source 1..25: mol_type = other DNA
ggcaagtatatccacactccctggt

SEQ ID NO: 26911 - DNA, 25 bp, synthetic construct
  misc_feature 1..25: note = Oligonucleotide
  source 1..25: mol_type = other DNA
acaggcaagtatatccacactccct

SEQ ID NO: 26912 - DNA, 25 bp, synthetic construct
  misc_feature 1..25: note = Oligonucleotide
  source 1..25: mol_type = other DNA
agaacaggcaagtatatccacactc

SEQ ID NO: 26913 - DNA, 25 bp, synthetic construct
  misc_feature 1..25: note = Oligonucleotide
  source 1..25: mol_type = other DNA
cccagaacaggcaagtatatccaca

SEQ ID NO: 26914 - DNA, 25 bp, synthetic construct
  misc_feature 1..25: note = Oligonucleotide
  source 1..25: mol_type = other DNA
acccccagaacaggcaagtatatcc

SEQ ID NO: 26915 - DNA, 25 bp, synthetic construct
  misc_feature 1..25: note = Oligonucleotide
  source 1..25: mol_type = other DNA
tacacccccagaacaggcaagtata

SEQ ID NO: 26916 - DNA, 25 bp, synthetic construct
  misc_feature 1..25: note = Oligonucleotide
  source 1..25: mol_type = other DNA
atgtacacccccagaacaggcaagt

SEQ ID NO: 26917 - DNA, 25 bp, synthetic construct
  misc_feature 1..25: note = Oligonucleotide
  source 1..25: mol_type = other DNA
cacatgtacacccccagaacaggca

SEQ ID NO: 26918 - DNA, 25 bp, synthetic construct
  misc_feature 1..25: note = Oligonucleotide
  source 1..25: mol_type = other DNA
acacacatgtacacccccagaacag

SEQ ID NO: 26919 - DNA, 25 bp, synthetic construct
  misc_feature 1..25: note = Oligonucleotide
  source 1..25: mol_type = other DNA
tgcacacacatgtacacccccagaa

SEQ ID NO: 26920 - DNA, 25 bp, synthetic construct
  misc_feature 1..25: note = Oligonucleotide
  source 1..25: mol_type = other DNA
gtgtgcacacacatgtacaccccca

SEQ ID NO: 26921 - DNA, 25 bp, synthetic construct
  misc_feature 1..25: note = Oligonucleotide
  source 1..25: mol_type = other DNA
tctgtgtgcacacacatgtacaccc

SEQ ID NO: 26922 - DNA, 25 bp, synthetic construct
  misc_feature 1..25: note = Oligonucleotide
  source 1..25: mol_type = other DNA
tcatctgtgtgcacacacatgtaca

SEQ ID NO: 26923 - DNA, 25 bp, synthetic construct
  misc_feature 1..25: note = Oligonucleotide
  source 1..25: mol_type = other DNA
gggtcatctgtgtgcacacacatgt

SEQ ID NO: 26924 - DNA, 25 bp, synthetic construct
  misc_feature 1..25: note = Oligonucleotide
  source 1..25: mol_type = other DNA
acagggtcatctgtgtgcacacaca

SEQ ID NO: 26925 - DNA, 25 bp, synthetic construct
  misc_feature 1..25: note = Oligonucleotide
  source 1..25: mol_type = other DNA
tgtacagggtcatctgtgtgcacac

SEQ ID NO: 26926 - DNA, 25 bp, synthetic construct
  misc_feature 1..25: note = Oligonucleotide
  source 1..25: mol_type = other DNA
cagtgtacagggtcatctgtgtgca

SEQ ID NO: 26927 - DNA, 25 bp, synthetic construct
  misc_feature 1..25: note = Oligonucleotide
  source 1..25: mol_type = other DNA
aatcagtgtacagggtcatctgtgt

SEQ ID NO: 26928 - DNA, 25 bp, synthetic construct
  misc_feature 1..25: note = Oligonucleotide
  source 1..25: mol_type = other DNA
tgcaatcagtgtacagggtcatctg

SEQ ID NO: 26929 - DNA, 25 bp, synthetic construct
  misc_feature 1..25: note = Oligonucleotide
  source 1..25: mol_type = other DNA
gcatgcaatcagtgtacagggtcat

SEQ ID NO: 26930 - DNA, 25 bp, synthetic construct
  misc_feature 1..25: note = Oligonucleotide
  source 1..25: mol_type = other DNA
cacgcatgcaatcagtgtacagggt

SEQ ID NO: 26931 - DNA, 25 bp, synthetic construct
  misc_feature 1..25: note = Oligonucleotide
  source 1..25: mol_type = other DNA
gtgcacgcatgcaatcagtgtacag

SEQ ID NO: 26932 - DNA, 25 bp, synthetic construct
  misc_feature 1..25: note = Oligonucleotide
  source 1..25: mol_type = other DNA
ctggtgcacgcatgcaatcagtgta

SEQ ID NO: 26933 - DNA, 25 bp, synthetic construct
  misc_feature 1..25: note = Oligonucleotide
  source 1..25: mol_type = other DNA
tccctggtgcacgcatgcaatcagt

SEQ ID NO: 26934 - DNA, 25 bp, synthetic construct
  misc_feature 1..25: note = Oligonucleotide
  source 1..25: mol_type = other DNA
cactccctggtgcacgcatgcaatc

SEQ ID NO: 26935 - DNA, 25 bp, synthetic construct
  misc_feature 1..25: note = Oligonucleotide
  source 1..25: mol_type = other DNA
ccacactccctggtgcacgcatgca

SEQ ID NO: 26936 - DNA, 25 bp, synthetic construct
  misc_feature 1..25: note = Oligonucleotide
  source 1..25: mol_type = other DNA
tatccacactccctggtgcacgcat

SEQ ID NO: 26937 - DNA, 25 bp, synthetic construct
  misc_feature 1..25: note = Oligonucleotide
  source 1..25: mol_type = other DNA
gtatatccacactccctggtgcacg

SEQ ID NO: 26938 - DNA, 25 bp, synthetic construct
  misc_feature 1..25: note = Oligonucleotide
  source 1..25: mol_type = other DNA
caagtatatccacactccctggtgc

SEQ ID NO: 26939 - DNA, 25 bp, synthetic construct
  misc_feature 1..25: note = Oligonucleotide
  source 1..25: mol_type = other DNA
aggcaagtatatccacactccctgg

SEQ ID NO: 26940 - DNA, 25 bp, synthetic construct
  misc_feature 1..25: note = Oligonucleotide
  source 1..25: mol_type = other DNA
aacaggcaagtatatccacactccc

SEQ ID NO: 26941 - DNA, 25 bp, synthetic construct
  misc_feature 1..25: note = Oligonucleotide
  source 1..25: mol_type = other DNA
cagaacaggcaagtatatccacact

SEQ ID NO: 26942 - DNA, 25 bp, synthetic construct
  misc_feature 1..25: note = Oligonucleotide
  source 1..25: mol_type = other DNA
ccccagaacaggcaagtatatccac

SEQ ID NO: 26943 - DNA, 25 bp, synthetic construct
  misc_feature 1..25: note = Oligonucleotide
  source 1..25: mol_type = other DNA
cacccccagaacaggcaagtatatc

SEQ ID NO: 26944 - DNA, 25 bp, synthetic construct
  misc_feature 1..25: note = Oligonucleotide
  source 1..25: mol_type = other DNA
gtacacccccagaacaggcaagtat

SEQ ID NO: 26945 - DNA, 25 bp, synthetic construct
  misc_feature 1..25: note = Oligonucleotide
  source 1..25: mol_type = other DNA
catgtacacccccagaacaggcaag

SEQ ID NO: 26946 - DNA, 25 bp, synthetic construct
  misc_feature 1..25: note = Oligonucleotide
  source 1..25: mol_type = other DNA
acacatgtacacccccagaacaggc

SEQ ID NO: 26947 - DNA, 25 bp, synthetic construct
  misc_feature 1..25: note = Oligonucleotide
  source 1..25: mol_type = other DNA
cacacacatgtacacccccagaaca

SEQ ID NO: 26948 - DNA, 25 bp, synthetic construct
  misc_feature 1..25: note = Oligonucleotide
  source 1..25: mol_type = other DNA
gtgcacacacatgtacacccccaga

SEQ ID NO: 26949 - DNA, 25 bp, synthetic construct
  misc_feature 1..25: note = Oligonucleotide
  source 1..25: mol_type = other DNA
tgtgtgcacacacatgtacaccccc

SEQ ID NO: 26950 - DNA, 25 bp, synthetic construct
  misc_feature 1..25: note = Oligonucleotide
  source 1..25: mol_type = other DNA
atctgtgtgcacacacatgtacacc

SEQ ID NO: 26951 - DNA, 25 bp, synthetic construct
  misc_feature 1..25: note = Oligonucleotide
  source 1..25: mol_type = other DNA
gtcatctgtgtgcacacacatgtac

SEQ ID NO: 26952 - DNA, 25 bp, synthetic construct
  misc_feature 1..25: note = Oligonucleotide
  source 1..25: mol_type = other DNA
agggtcatctgtgtgcacacacatg

SEQ ID NO: 26953 - DNA, 25 bp, synthetic construct
  misc_feature 1..25: note = Oligonucleotide
  source 1..25: mol_type = other DNA
tacagggtcatctgtgtgcacacac

SEQ ID NO: 26954 - DNA, 25 bp, synthetic construct
  misc_feature 1..25: note = Oligonucleotide
  source 1..25: mol_type = other DNA
ctgtacagggtcatctgtgtgcaca

SEQ ID NO: 26955 - DNA, 25 bp, synthetic construct
  misc_feature 1..25: note = Oligonucleotide
  source 1..25: mol_type = other DNA
tcactgtacagggtcatctgtgtgc

SEQ ID NO: 26956 - DNA, 25 bp, synthetic construct
  misc_feature 1..25: note = Oligonucleotide
  source 1..25: mol_type = other DNA
caatcactgtacagggtcatctgtg

SEQ ID NO: 26957 - DNA, 25 bp, synthetic construct
  misc_feature 1..25: note = Oligonucleotide
  source 1..25: mol_type = other DNA
atgcaatcactgtacagggtcatct

SEQ ID NO: 26958 - DNA, 25 bp, synthetic construct
  misc_feature 1..25: note = Oligonucleotide
  source 1..25: mol_type = other DNA
cgcatgcaatcactgtacagggtca

SEQ ID NO: 26959 - DNA, 25 bp, synthetic construct
  misc_feature 1..25: note = Oligonucleotide
  source 1..25: mol_type = other DNA
gcacgcatgcaatcactgtacaggg

SEQ ID NO: 26960 - DNA, 25 bp, synthetic construct
  misc_feature 1..25: note = Oligonucleotide
  source 1..25: mol_type = other DNA
ggtgcacgcatgcaatcactgtaca

SEQ ID NO: 26961 - DNA, 25 bp, synthetic construct
  misc_feature 1..25: note = Oligonucleotide
  source 1..25: mol_type = other DNA
cctggtgcacgcatgcaatcactgt

SEQ ID NO: 26962 - DNA, 25 bp, synthetic construct
  misc_feature 1..25: note = Oligonucleotide
  source 1..25: mol_type = other DNA
ctccctggtgcacgcatgcaatcac

SEQ ID NO: 26963 - DNA, 25 bp, synthetic construct
  misc_feature 1..25: note = Oligonucleotide
  source 1..25: mol_type = other DNA
acactccctggtgcacgcatgcaat

SEQ ID NO: 26964 - DNA, 25 bp, synthetic construct
  misc_feature 1..25: note = Oligonucleotide
  source 1..25: mol_type = other DNA
tccacactccctggtgcacgcatgc

SEQ ID NO: 26965 - DNA, 25 bp, synthetic construct
  misc_feature 1..25: note = Oligonucleotide
  source 1..25: mol_type = other DNA
atatccacactccctggtgcacgca

SEQ ID NO: 26966 - DNA, 25 bp, synthetic construct
  misc_feature 1..25: note = Oligonucleotide
  source 1..25: mol_type = other DNA
agtatatccacactccctggtgcac

SEQ ID NO: 26967 - DNA, 25 bp, synthetic construct
  misc_feature 1..25: note = Oligonucleotide
  source 1..25: mol_type = other DNA
gcaagtatatccacactccctggtg

SEQ ID NO: 26968 - DNA, 25 bp, synthetic construct
  misc_feature 1..25: note = Oligonucleotide
  source 1..25: mol_type = other DNA
caggcaagtatatccacactccctg

SEQ ID NO: 26969 - DNA, 25 bp, synthetic construct
  misc_feature 1..25: note = Oligonucleotide
  source 1..25: mol_type = other DNA
gaacaggcaagtatatccacactcc

SEQ ID NO: 26970 - DNA, 25 bp, synthetic construct
  misc_feature 1..25: note = Oligonucleotide
  source 1..25: mol_type = other DNA
ccagaacaggcaagtatatccacac

SEQ ID NO: 26971 - DNA, 25 bp, synthetic construct
  misc_feature 1..25: note = Oligonucleotide
  source 1..25: mol_type = other DNA
cccccagaacaggcaagtatatcca

SEQ ID NO: 26972 - DNA, 25 bp, synthetic construct
  misc_feature 1..25: note = Oligonucleotide
  source 1..25: mol_type = other DNA
acacccccagaacaggcaagtatat

SEQ ID NO: 26973 - DNA, 25 bp, synthetic construct
  misc_feature 1..25: note = Oligonucleotide
  source 1..25: mol_type = other DNA
tgtacacccccagaacaggcaagta

SEQ ID NO: 26974 - DNA, 25 bp, synthetic construct
  misc_feature 1..25: note = Oligonucleotide
  source 1..25: mol_type = other DNA
acatgtacacccccagaacaggcaa

SEQ ID NO: 26975 - DNA, 25 bp, synthetic construct
  misc_feature 1..25: note = Oligonucleotide
  source 1..25: mol_type = other DNA
cacacatgtacacccccagaacagg

SEQ ID NO: 26976 - DNA, 25 bp, synthetic construct
  misc_feature 1..25: note = Oligonucleotide
  source 1..25: mol_type = other DNA
gcacacacatgtacacccccagaac

SEQ ID NO: 26977 - DNA, 25 bp, synthetic construct
  misc_feature 1..25: note = Oligonucleotide
  source 1..25: mol_type = other DNA
tgtgcacacacatgtacacccccag

SEQ ID NO: 26978 - DNA, 25 bp, synthetic construct
  misc_feature 1..25: note = Oligonucleotide
  source 1..25: mol_type = other DNA
ctgtgtgcacacacatgtacacccc

SEQ ID NO: 26979 - DNA, 25 bp, synthetic construct
  misc_feature 1..25: note = Oligonucleotide
  source 1..25: mol_type = other DNA
catctgtgtgcacacacatgtacac

SEQ ID NO: 26980 - DNA, 25 bp, synthetic construct
  misc_feature 1..25: note = Oligonucleotide
  source 1..25: mol_type = other DNA
ggtcatctgtgtgcacacacatgta

SEQ ID NO: 26981 - DNA, 25 bp, synthetic construct
  misc_feature 1..25: note = Oligonucleotide
  source 1..25: mol_type = other DNA
cagggtcatctgtgtgcacacacat

SEQ ID NO: 26982 - DNA, 25 bp, synthetic construct
  misc_feature 1..25: note = Oligonucleotide
  source 1..25: mol_type = other DNA
gtacagggtcatctgtgtgcacaca

SEQ ID NO: 26983 - DNA, 25 bp, synthetic construct
  misc_feature 1..25: note = Oligonucleotide
  source 1..25: mol_type = other DNA
agtgtacagggtcatctgtgtgcac

SEQ ID NO: 26984 - DNA, 25 bp, synthetic construct
  misc_feature 1..25: note = Oligonucleotide
  source 1..25: mol_type = other DNA
atcagtgtacagggtcatctgtgtg

SEQ ID NO: 26985 - DNA, 25 bp, synthetic construct
  misc_feature 1..25: note = Oligonucleotide
  source 1..25: mol_type = other DNA
gcaatcagtgtacagggtcatctgt

SEQ ID NO: 26986 - DNA, 25 bp, synthetic construct
  misc_feature 1..25: note = Oligonucleotide
  source 1..25: mol_type = other DNA
catgcaatcagtgtacagggtcatc

SEQ ID NO: 26987 - DNA, 25 bp, synthetic construct
  misc_feature 1..25: note = Oligonucleotide
  source 1..25: mol_type = other DNA
acgcatgcaatcagtgtacagggtc

SEQ ID NO: 26988 - DNA, 25 bp, synthetic construct
  misc_feature 1..25: note = Oligonucleotide
  source 1..25: mol_type = other DNA
tgcacgcatgcaatcagtgtacagg

SEQ ID NO: 26989 - DNA, 25 bp, synthetic construct
  misc_feature 1..25: note = Oligonucleotide
  source 1..25: mol_type = other DNA
tggtgcacgcatgcaatcagtgtac

SEQ ID NO: 26990 - DNA, 25 bp, synthetic construct
  misc_feature 1..25: note = Oligonucleotide
  source 1..25: mol_type = other DNA
ccctggtgcacgcatgcaatcagtg

SEQ ID NO: 26991 - DNA, 25 bp, synthetic construct
  misc_feature 1..25: note = Oligonucleotide
  source 1..25: mol_type = other DNA
actccctggtgcacgcatgcaatca

SEQ ID NO: 26992 - DNA, 25 bp, synthetic construct
  misc_feature 1..25: note = Oligonucleotide
  source 1..25: mol_type = other DNA
cacactccctggtgcacgcatgcaa

SEQ ID NO: 26993 - DNA, 25 bp, synthetic construct
  misc_feature 1..25: note = Oligonucleotide
  source 1..25: mol_type = other DNA
atccacactccctggtgcacgcatg

SEQ ID NO: 26994 - DNA, 25 bp, synthetic construct
  misc_feature 1..25: note = Oligonucleotide
  source 1..25: mol_type = other DNA
tatatccacactccctggtgcacgc

SEQ ID NO: 26995 - DNA, 25 bp, synthetic construct
  misc_feature 1..25: note = Oligonucleotide
  source 1..25: mol_type = other DNA
aagtatatccacactccctggtgca

SEQ ID NO: 26996 - DNA, 25 bp, synthetic construct
  misc_feature 1..25: note = Oligonucleotide
  source 1..25: mol_type = other DNA
ggcaagtatatccacactccctggt

SEQ ID NO: 26997 - DNA, 25 bp, synthetic construct
  misc_feature 1..25: note = Oligonucleotide
  source 1..25: mol_type = other DNA
acaggcaagtatatccacactccct

SEQ ID NO: 26998 - DNA, 25 bp, synthetic construct
  misc_feature 1..25: note = Oligonucleotide
  source 1..25: mol_type = other DNA
agaacaggcaagtatatccacactc

SEQ ID NO: 26999 - DNA, 25 bp, synthetic construct
  misc_feature 1..25: note = Oligonucleotide
  source 1..25: mol_type = other DNA
accagaacaggcaagtatatccaca

SEQ ID NO: 27000 - DNA, 25 bp, synthetic construct
  misc_feature 1..25: note = Oligonucleotide
  source 1..25: mol_type = other DNA
aacaccagaacaggcaagtatatcc

SEQ ID NO: 27001 - DNA, 25 bp, synthetic construct
  misc_feature 1..25: note = Oligonucleotide
  source 1..25: mol_type = other DNA
tacaacaccagaacaggcaagtata

SEQ ID NO: 27002 - DNA, 25 bp, synthetic construct
  misc_feature 1..25: note = Oligonucleotide
  source 1..25: mol_type = other DNA
atgtacaacaccagaacaggcaagt

SEQ ID NO: 27003 - DNA, 25 bp, synthetic construct
  misc_feature 1..25: note = Oligonucleotide
  source 1..25: mol_type = other DNA
cacatgtacaacaccagaacaggca

SEQ ID NO: 27004 - DNA, 25 bp, synthetic construct
  misc_feature 1..25: note = Oligonucleotide
  source 1..25: mol_type = other DNA
acacacatgtacaacaccagaacag

SEQ ID NO: 27005 - DNA, 25 bp, synthetic construct
  misc_feature 1..25: note = Oligonucleotide
  source 1..25: mol_type = other DNA
cacacacacatgtacaacaccagaa

SEQ ID NO: 27006 - DNA, 25 bp, synthetic construct
  misc_feature 1..25: note = Oligonucleotide
  source 1..25: mol_type = other DNA
gcacacacacacatgtacaacacca

SEQ ID NO: 27007 - DNA, 25 bp, synthetic construct
  misc_feature 1..25: note = Oligonucleotide
  source 1..25: mol_type = other DNA
tgtgcacacacacacatgtacaaca

SEQ ID NO: 27008 - DNA, 25 bp, synthetic construct
  misc_feature 1..25: note = Oligonucleotide
  source 1..25: mol_type = other DNA
ctgtgtgcacacacacacatgtaca

SEQ ID NO: 27009 - DNA, 25 bp, synthetic construct
  misc_feature 1..25: note = Oligonucleotide
  source 1..25: mol_type = other DNA
catctgtgtgcacacacacacatgt

SEQ ID NO: 27010 - DNA, 25 bp, synthetic construct
  misc_feature 1..25: note = Oligonucleotide
  source 1..25: mol_type = other DNA
agtcatctgtgtgcacacacacaca

SEQ ID NO: 27011 - DNA, 25 bp, synthetic construct
  misc_feature 1..25: note = Oligonucleotide
  source 1..25: mol_type = other DNA
tagagtcatctgtgtgcacacacac

SEQ ID NO: 27012 - DNA, 25 bp, synthetic construct
  misc_feature 1..25: note = Oligonucleotide
  source 1..25: mol_type = other DNA
ctgtagagtcatctgtgtgcacaca

SEQ ID NO: 27013 - DNA, 25 bp, synthetic construct
  misc_feature 1..25: note = Oligonucleotide
  source 1..25: mol_type = other DNA
tcactgtagagtcatctgtgtgcac

SEQ ID NO: 27014 - DNA, 25 bp, synthetic construct
  misc_feature 1..25: note = Oligonucleotide
  source 1..25: mol_type = other DNA
caatcactgtagagtcatctgtgtg

SEQ ID NO: 27015 - DNA, 25 bp, synthetic construct
  misc_feature 1..25: note = Oligonucleotide
  source 1..25: mol_type = other DNA
atacaatcactgtagagtcatctgt

SEQ ID NO: 27016 - DNA, 25 bp, synthetic construct
  misc_feature 1..25: note = Oligonucleotide
  source 1..25: mol_type = other DNA
cgcatacaatcactgtagagtcatc

SEQ ID NO: 27017 - DNA, 25 bp, synthetic construct
  misc_feature 1..25: note = Oligonucleotide
  source 1..25: mol_type = other DNA
gcacgcatacaatcactgtagagtc

SEQ ID NO: 27018 - DNA, 25 bp, synthetic construct
  misc_feature 1..25: note = Oligonucleotide
  source 1..25: mol_type = other DNA
gctgcacgcatacaatcactgtaga

SEQ ID NO: 27019 - DNA, 25 bp, synthetic construct
  misc_feature 1..25: note = Oligonucleotide
  source 1..25: mol_type = other DNA
cctgctgcacgcatacaatcactgt

SEQ ID NO: 27020 - DNA, 25 bp, synthetic construct
  misc_feature 1..25: note = Oligonucleotide
  source 1..25: mol_type = other DNA
ctacctgctgcacgcatacaatcac

SEQ ID NO: 27021 - DNA, 25 bp, synthetic construct
  misc_feature 1..25: note = Oligonucleotide
  source 1..25: mol_type = other DNA
acactacctgctgcacgcatacaat

SEQ ID NO: 27022 - DNA, 25 bp, synthetic construct
  misc_feature 1..25: note = Oligonucleotide
  source 1..25: mol_type = other DNA
tccacactacctgctgcacgcatac

SEQ ID NO: 27023 - DNA, 25 bp, synthetic construct
  misc_feature 1..25: note = Oligonucleotide
  source 1..25: mol_type = other DNA
atatccacactacctgctgcacgca

SEQ ID NO: 27024 - DNA, 25 bp, synthetic construct
  misc_feature 1..25: note = Oligonucleotide
  source 1..25: mol_type = other DNA
agtatatccacactacctgctgcac

SEQ ID NO: 27025 - DNA, 25 bp, synthetic construct
  misc_feature 1..25: note = Oligonucleotide
  source 1..25: mol_type = other DNA
gcaagtatatccacactacctgctg

SEQ ID NO: 27026 - DNA, 25 bp, synthetic construct
  misc_feature 1..25: note = Oligonucleotide
  source 1..25: mol_type = other DNA
caggcaagtatatccacactacctg

SEQ ID NO: 27027 - DNA, 25 bp, synthetic construct
  misc_feature 1..25: note = Oligonucleotide
  source 1..25: mol_type = other DNA
gaacaggcaagtatatccacactac

SEQ ID NO: 27028 - DNA, 25 bp, synthetic construct
  misc_feature 1..25: note = Oligonucleotide
  source 1..25: mol_type = other DNA
ccagaacaggcaagtatatccacac

SEQ ID NO: 27029 - DNA, 25 bp, synthetic construct
  misc_feature 1..25: note = Oligonucleotide
  source 1..25: mol_type = other DNA
cccccagaacaggcaagtatatcca

SEQ ID NO: 27030 - DNA, 25 bp, synthetic construct
  misc_feature 1..25: note = Oligonucleotide
  source 1..25: mol_type = other DNA
acacccccagaacaggcaagtatat

SEQ ID NO: 27031 - DNA, 25 bp, synthetic construct
  misc_feature 1..25: note = Oligonucleotide
  source 1..25: mol_type = other DNA
tgtacacccccagaacaggcaagta

SEQ ID NO: 27032 - DNA, 25 bp, synthetic construct
  misc_feature 1..25: note = Oligonucleotide
  source 1..25: mol_type = other DNA
acgtgtacacccccagaacaggcaa

SEQ ID NO: 27033 - DNA, 25 bp, synthetic construct
  misc_feature 1..25: note = Oligonucleotide
  source 1..25: mol_type = other DNA
cacacgtgtacacccccagaacagg

SEQ ID NO: 27034 - DNA, 25 bp, synthetic construct
  misc_feature 1..25: note = Oligonucleotide
  source 1..25: mol_type = other DNA
aaacacacgtgtacacccccagaac

SEQ ID NO: 27035 - DNA, 25 bp, synthetic construct
  misc_feature 1..25: note = Oligonucleotide
  source 1..25: mol_type = other DNA
tgcaaacacacgtgtacacccccag

SEQ ID NO: 27036 - DNA, 25 bp, synthetic construct
  misc_feature 1..25: note = Oligonucleotide
  source 1..25: mol_type = other DNA
gtgtgcaaacacacgtgtacacccc

SEQ ID NO: 27037 - DNA, 25 bp, synthetic construct
  misc_feature 1..25: note = Oligonucleotide
  source 1..25: mol_type = other DNA
tctgtgtgcaaacacacgtgtacac

SEQ ID NO: 27038 - DNA, 25 bp, synthetic construct
  misc_feature 1..25: note = Oligonucleotide
  source 1..25: mol_type = other DNA
tcatctgtgtgcaaacacacgtgta

SEQ ID NO: 27039 - DNA, 25 bp, synthetic construct
  misc_feature 1..25: note = Oligonucleotide
  source 1..25: mol_type = other DNA
gggtcatctgtgtgcaaacacacgt

SEQ ID NO: 27040 - DNA, 25 bp, synthetic construct
  misc_feature 1..25: note = Oligonucleotide
  source 1..25: mol_type = other DNA
acagggtcatctgtgtgcaaacaca

SEQ ID NO: 27041 - DNA, 25 bp, synthetic construct
  misc_feature 1..25: note = Oligonucleotide
  source 1..25: mol_type = other DNA
tgtacagggtcatctgtgtgcaaac

SEQ ID NO: 27042 - DNA, 25 bp, synthetic construct
  misc_feature 1..25: note = Oligonucleotide
  source 1..25: mol_type = other DNA
cactgtacagggtcatctgtgtgca

SEQ ID NO: 27043 - DNA, 25 bp, synthetic construct
  misc_feature 1..25: note = Oligonucleotide
  source 1..25: mol_type = other DNA
aatcactgtacagggtcatctgtgt

SEQ ID NO: 27044 - DNA, 25 bp, synthetic construct
  misc_feature 1..25: note = Oligonucleotide
  source 1..25: mol_type = other DNA
tacaatcactgtacagggtcatctg

SEQ ID NO: 27045 - DNA, 25 bp, synthetic construct
  misc_feature 1..25: note = Oligonucleotide
  source 1..25: mol_type = other DNA
gcatacaatcactgtacagggtcat

SEQ ID NO: 27046 - DNA, 25 bp, synthetic construct
  misc_feature 1..25: note = Oligonucleotide
  source 1..25: mol_type = other DNA
cacgcatacaatcactgtacagggt

SEQ ID NO: 27047 - DNA, 25 bp, synthetic construct
  misc_feature 1..25: note = Oligonucleotide
  source 1..25: mol_type = other DNA
gtacacgcatacaatcactgtacag

SEQ ID NO: 27048 - DNA, 25 bp, synthetic construct
  misc_feature 1..25: note = Oligonucleotide
  source 1..25: mol_type = other DNA
ctggtacacgcatacaatcactgta

SEQ ID NO: 27049 - DNA, 25 bp, synthetic construct
  misc_feature 1..25: note = Oligonucleotide
  source 1..25: mol_type = other DNA
tccctggtacacgcatacaatcact

SEQ ID NO: 27050 - DNA, 25 bp, synthetic construct
  misc_feature 1..25: note = Oligonucleotide
  source 1..25: mol_type = other DNA
cactccctggtacacgcatacaatc

SEQ ID NO: 27051 - DNA, 25 bp, synthetic construct
  misc_feature 1..25: note = Oligonucleotide
  source 1..25: mol_type = other DNA
ccacactccctggtacacgcataca

SEQ ID NO: 27052 - DNA, 25 bp, synthetic construct
  misc_feature 1..25: note = Oligonucleotide
  source 1..25: mol_type = other DNA
tatccacactccctggtacacgcat

SEQ ID NO: 27053 - DNA, 25 bp, synthetic construct
  misc_feature 1..25: note = Oligonucleotide
  source 1..25: mol_type = other DNA
gtatatccacactccctggtacacg

SEQ ID NO: 27054 - DNA, 25 bp, synthetic construct
  misc_feature 1..25: note = Oligonucleotide
  source 1..25: mol_type = other DNA
caagtatatccacactccctggtac

SEQ ID NO: 27055 - DNA, 25 bp, synthetic construct
  misc_feature 1..25: note = Oligonucleotide
  source 1..25: mol_type = other DNA
aggcaagtatatccacactccctgg

SEQ ID NO: 27056 - DNA, 25 bp, synthetic construct
  misc_feature 1..25: note = Oligonucleotide
  source 1..25: mol_type = other DNA
aacaggcaagtatatccacactccc

SEQ ID NO: 27057 - DNA, 25 bp, synthetic construct
  misc_feature 1..25: note = Oligonucleotide
  source 1..25: mol_type = other DNA
cagaacaggcaagtatatccacact

SEQ ID NO: 27058 - DNA, 25 bp, synthetic construct
  misc_feature 1..25: note = Oligonucleotide
  source 1..25: mol_type = other DNA
ccccagaacaggcaagtatatccac

SEQ ID NO: 27059 - DNA, 25 bp, synthetic construct
  misc_feature 1..25: note = Oligonucleotide
  source 1..25: mol_type = other DNA
cacccccagaacaggcaagtatatc

SEQ ID NO: 27060 - DNA, 25 bp, synthetic construct
  misc_feature 1..25: note = Oligonucleotide
  source 1..25: mol_type = other DNA
gtacacccccagaacaggcaagtat

SEQ ID NO: 27061 - DNA, 25 bp, synthetic construct
  misc_feature 1..25: note = Oligonucleotide
  source 1..25: mol_type = other DNA
catgtacacccccagaacaggcaag

SEQ ID NO: 27062 - DNA, 25 bp, synthetic construct
  misc_feature 1..25: note = Oligonucleotide
  source 1..25: mol_type = other DNA
acacatgtacacccccagaacaggc

SEQ ID NO: 27063 - DNA, 25 bp, synthetic construct
  misc_feature 1..25: note = Oligonucleotide
  source 1..25: mol_type = other DNA
cacacacatgtacacccccagaaca

SEQ ID NO: 27064 - DNA, 25 bp, synthetic construct
  misc_feature 1..25: note = Oligonucleotide
  source 1..25: mol_type = other DNA
gtgcacacacatgtacacccccaga

SEQ ID NO: 27065 - DNA, 25 bp, synthetic construct
  misc_feature 1..25: note = Oligonucleotide
  source 1..25: mol_type = other DNA
tgtgtgcacacacatgtacaccccc

SEQ ID NO: 27066 - DNA, 25 bp, synthetic construct
  misc_feature 1..25: note = Oligonucleotide
  source 1..25: mol_type = other DNA
atctgtgtgcacacacatgtacacc

SEQ ID NO: 27067 - DNA, 25 bp, synthetic construct
  misc_feature 1..25: note = Oligonucleotide
  source 1..25: mol_type = other DNA
gtcatctgtgtgcacacacatgtac

SEQ ID NO: 27068 - DNA, 25 bp, synthetic construct
  misc_feature 1..25: note = Oligonucleotide
  source 1..25: mol_type = other DNA
agggtcatctgtgtgcacacacatg

SEQ ID NO: 27069 - DNA, 25 bp, synthetic construct
  misc_feature 1..25: note = Oligonucleotide
  source 1..25: mol_type = other DNA
tacagggtcatctgtgtgcacacac

SEQ ID NO: 27070 - DNA, 25 bp, synthetic construct
  misc_feature 1..25: note = Oligonucleotide
  source 1..25: mol_type = other DNA
ctgtacagggtcatctgtgtgcaca

SEQ ID NO: 27071 - DNA, 25 bp, synthetic construct
  misc_feature 1..25: note = Oligonucleotide
  source 1..25: mol_type = other DNA
tcactgtacagggtcatctgtgtgc

SEQ ID NO: 27072 - DNA, 25 bp, synthetic construct
  misc_feature 1..25: note = Oligonucleotide
  source 1..25: mol_type = other DNA
caatcactgtacagggtcatctgtg

SEQ ID NO: 27073 - DNA, 25 bp, synthetic construct
  misc_feature 1..25: note = Oligonucleotide
  source 1..25: mol_type = other DNA
atacaatcactgtacagggtcatct

SEQ ID NO: 27074 - DNA, 25 bp, synthetic construct
  misc_feature 1..25: note = Oligonucleotide
  source 1..25: mol_type = other DNA
cgcatacaatcactgtacagggtca

SEQ ID NO: 27075 - DNA, 25 bp, synthetic construct
  misc_feature 1..25: note = Oligonucleotide
  source 1..25: mol_type = other DNA
gcacgcatacaatcactgtacaggg

SEQ ID NO: 27076 - DNA, 25 bp, synthetic construct
  misc_feature 1..25: note = Oligonucleotide
  source 1..25: mol_type = other DNA
ggtgcacgcatacaatcactgtaca

SEQ ID NO: 27077 - DNA, 25 bp, synthetic construct
  misc_feature 1..25: note = Oligonucleotide
  source 1..25: mol_type = other DNA
cctggtgcacgcatacaatcactgt

SEQ ID NO: 27078 - DNA, 25 bp, synthetic construct
  misc_feature 1..25: note = Oligonucleotide
  source 1..25: mol_type = other DNA
ctacctggtgcacgcatacaatcac

SEQ ID NO: 27079 - DNA, 25 bp, synthetic construct
  misc_feature 1..25: note = Oligonucleotide
  source 1..25: mol_type = other DNA
acactacctggtgcacgcatacaat

SEQ ID NO: 27080 - DNA, 25 bp, synthetic construct
  misc_feature 1..25: note = Oligonucleotide
  source 1..25: mol_type = other DNA
tccacactacctggtgcacgcatac

SEQ ID NO: 27081 - DNA, 25 bp, synthetic construct
  misc_feature 1..25: note = Oligonucleotide
  source 1..25: mol_type = other DNA
atatccacactacctggtgcacgca

SEQ ID NO: 27082 - DNA, 25 bp, synthetic construct
  misc_feature 1..25: note = Oligonucleotide
  source 1..25: mol_type = other DNA
agtatatccacactacctggtgcac

SEQ ID NO: 27083 - DNA, 25 bp, synthetic construct
  misc_feature 1..25: note = Oligonucleotide
  source 1..25: mol_type = other DNA
gcaagtatatccacactacctggtg

SEQ ID NO: 27084 - DNA, 25 bp, synthetic construct
  misc_feature 1..25: note = Oligonucleotide
  source 1..25: mol_type = other DNA
caggcaagtatatccacactacctg

SEQ ID NO: 27085 - DNA, 25 bp, synthetic construct
  misc_feature 1..25: note = Oligonucleotide
  source 1..25: mol_type = other DNA
gaacaggcaagtatatccacactac

SEQ ID NO: 27086 - DNA, 25 bp, synthetic construct
  misc_feature 1..25: note = Oligonucleotide
  source 1..25: mol_type = other DNA
ccagaacaggcaagtatatccacac

SEQ ID NO: 27087 - DNA, 25 bp, synthetic construct
  misc_feature 1..25: note = Oligonucleotide
  source 1..25: mol_type = other DNA
cccccagaacaggcaagtatatcca

SEQ ID NO: 27088 - DNA, 25 bp, synthetic construct
  misc_feature 1..25: note = Oligonucleotide
  source 1..25: mol_type = other DNA
acacccccagaacaggcaagtatat

SEQ ID NO: 27089 - DNA, 25 bp, synthetic construct
  misc_feature 1..25: note = Oligonucleotide
  source 1..25: mol_type = other DNA
tgtacacccccagaacaggcaagta

SEQ ID NO: 27090 - DNA, 25 bp, synthetic construct
  misc_feature 1..25: note = Oligonucleotide
  source 1..25: mol_type = other DNA
acgtgtacacccccagaacaggcaa

SEQ ID NO: 27091 - DNA, 25 bp, synthetic construct
  misc_feature 1..25: note = Oligonucleotide
  source 1..25: mol_type = other DNA
cacacgtgtacacccccagaacagg

SEQ ID NO: 27092 - DNA, 25 bp, synthetic construct
  misc_feature 1..25: note = Oligonucleotide
  source 1..25: mol_type = other DNA
aaacacacgtgtacacccccagaac

SEQ ID NO: 27093 - DNA, 25 bp, synthetic construct
  misc_feature 1..25: note = Oligonucleotide
  source 1..25: mol_type = other DNA
tgcaaacacacgtgtacacccccag

SEQ ID NO: 27094 - DNA, 25 bp, synthetic construct
  misc_feature 1..25: note = Oligonucleotide
  source 1..25: mol_type = other DNA
gtgtgcaaacacacgtgtacacccc

SEQ ID NO: 27095 - DNA, 25 bp, synthetic construct
  misc_feature 1..25: note = Oligonucleotide
  source 1..25: mol_type = other DNA
tctgtgtgcaaacacacgtgtacac

SEQ ID NO: 27096 - DNA, 25 bp, synthetic construct
  misc_feature 1..25: note = Oligonucleotide
  source 1..25: mol_type = other DNA
tcatctgtgtgcaaacacacgtgta

SEQ ID NO: 27097 - DNA, 25 bp, synthetic construct
  misc_feature 1..25: note = Oligonucleotide
  source 1..25: mol_type = other DNA
gggtcatctgtgtgcaaacacacgt

SEQ ID NO: 27098 - DNA, 25 bp, synthetic construct
  misc_feature 1..25: note = Oligonucleotide
  source 1..25: mol_type = other DNA
acagggtcatctgtgtgcaaacaca

SEQ ID NO: 27099 - DNA, 25 bp, synthetic construct
  misc_feature 1..25: note = Oligonucleotide
  source 1..25: mol_type = other DNA
tgtacagggtcatctgtgtgcaaac

SEQ ID NO: 27100 - DNA, 25 bp, synthetic construct
  misc_feature 1..25: note = Oligonucleotide
  source 1..25: mol_type = other DNA
cactgtacagggtcatctgtgtgca

SEQ ID NO: 27101 - DNA, 25 bp, synthetic construct
  misc_feature 1..25: note = Oligonucleotide
  source 1..25: mol_type = other DNA
aatcactgtacagggtcatctgtgt

SEQ ID NO: 27102 - DNA, 25 bp, synthetic construct
  misc_feature 1..25: note = Oligonucleotide
  source 1..25: mol_type = other DNA
tgcaatcactgtacagggtcatctg

SEQ ID NO: 27103 - DNA, 25 bp, synthetic construct
  misc_feature 1..25: note = Oligonucleotide
  source 1..25: mol_type = other DNA
gcatgcaatcactgtacagggtcat

SEQ ID NO: 27104 - DNA, 25 bp, synthetic construct
  misc_feature 1..25: note = Oligonucleotide
  source 1..25: mol_type = other DNA
cacgcatgcaatcactgtacagggt

SEQ ID NO: 27105 - DNA, 25 bp, synthetic construct
  misc_feature 1..25: note = Oligonucleotide
  source 1..25: mol_type = other DNA
gtgcacgcatgcaatcactgtacag

SEQ ID NO: 27106 - DNA, 25 bp, synthetic construct
  misc_feature 1..25: note = Oligonucleotide
  source 1..25: mol_type = other DNA
ctggtgcacgcatgcaatcactgta

SEQ ID NO: 27107 - DNA, 25 bp, synthetic construct
  misc_feature 1..25: note = Oligonucleotide
  source 1..25: mol_type = other DNA
tccctggtgcacgcatgcaatcact

SEQ ID NO: 27108 - DNA, 25 bp, synthetic construct
  misc_feature 1..25: note = Oligonucleotide
  source 1..25: mol_type = other DNA
cactccctggtgcacgcatgcaatc

SEQ ID NO: 27109 - DNA, 25 bp, synthetic construct
  misc_feature 1..25: note = Oligonucleotide
  source 1..25: mol_type = other DNA
ccacactccctggtgcacgcatgca

SEQ ID NO: 27110 - DNA, 25 bp, synthetic construct
  misc_feature 1..25: note = Oligonucleotide
  source 1..25: mol_type = other DNA
tatccacactccctggtgcacgcat

SEQ ID NO: 27111 - DNA, 25 bp, synthetic construct
  misc_feature 1..25: note = Oligonucleotide
  source 1..25: mol_type = other DNA
gtatatccacactccctggtgcacg

SEQ ID NO: 27112 - DNA, 25 bp, synthetic construct
  misc_feature 1..25: note = Oligonucleotide
  source 1..25: mol_type = other DNA
caagtatatccacactccctggtgc

SEQ ID NO: 27113 - DNA, 25 bp, synthetic construct
  misc_feature 1..25: note = Oligonucleotide
  source 1..25: mol_type = other DNA
aggcaagtatatccacactccctgg

SEQ ID NO: 27114 - DNA, 25 bp, synthetic construct
  misc_feature 1..25: note = Oligonucleotide
  source 1..25: mol_type = other DNA
aacaggcaagtatatccacactccc

SEQ ID NO: 27115 - DNA, 25 bp, synthetic construct
  misc_feature 1..25: note = Oligonucleotide
  source 1..25: mol_type = other DNA
cagaacaggcaagtatatccacact

SEQ ID NO: 27116 - DNA, 25 bp, synthetic construct
  misc_feature 1..25: note = Oligonucleotide
  source 1..25: mol_type = other DNA
ccccagaacaggcaagtatatccac

SEQ ID NO: 27117 - DNA, 25 bp, synthetic construct
  misc_feature 1..25: note = Oligonucleotide
  source 1..25: mol_type = other DNA
caaccccagaacaggcaagtatatc

SEQ ID NO: 27118 - DNA, 25 bp, synthetic construct
  misc_feature 1..25: note = Oligonucleotide
  source 1..25: mol_type = other DNA
gtacaaccccagaacaggcaagtat

SEQ ID NO: 27119 - DNA, 25 bp, synthetic construct
  misc_feature 1..25: note = Oligonucleotide
  source 1..25: mol_type = other DNA
catgtacaaccccagaacaggcaag

SEQ ID NO: 27120 - DNA, 25 bp, synthetic construct
  misc_feature 1..25: note = Oligonucleotide
  source 1..25: mol_type = other DNA
acacatgtacaaccccagaacaggc

SEQ ID NO: 27121 - DNA, 25 bp, synthetic construct
  misc_feature 1..25: note = Oligonucleotide
  source 1..25: mol_type = other DNA
cagacacatgtacaaccccagaaca

SEQ ID NO: 27122 - DNA, 25 bp, synthetic construct
  misc_feature 1..25: note = Oligonucleotide
  source 1..25: mol_type = other DNA
acacagacacatgtacaaccccaga

SEQ ID NO: 27123 - DNA, 25 bp, synthetic construct
  misc_feature 1..25: note = Oligonucleotide
  source 1..25: mol_type = other DNA
tgcacacagacacatgtacaacccc

SEQ ID NO: 27124 - DNA, 25 bp, synthetic construct
  misc_feature 1..25: note = Oligonucleotide
  source 1..25: mol_type = other DNA
gtgtgcacacagacacatgtacaac

SEQ ID NO: 27125 - DNA, 25 bp, synthetic construct
  misc_feature 1..25: note = Oligonucleotide
  source 1..25: mol_type = other DNA
tctgtgtgcacacagacacatgtac

SEQ ID NO: 27126 - DNA, 25 bp, synthetic construct
  misc_feature 1..25: note = Oligonucleotide
  source 1..25: mol_type = other DNA
tcatctgtgtgcacacagacacatg

SEQ ID NO: 27127 - DNA, 25 bp, synthetic construct
  misc_feature 1..25: note = Oligonucleotide
  source 1..25: mol_type = other DNA
gagtcatctgtgtgcacacagacac

SEQ ID NO: 27128 - DNA, 25 bp, synthetic construct
  misc_feature 1..25: note = Oligonucleotide
  source 1..25: mol_type = other DNA
acagagtcatctgtgtgcacacaga

SEQ ID NO: 27129 - DNA, 25 bp, synthetic construct
  misc_feature 1..25: note = Oligonucleotide
  source 1..25: mol_type = other DNA
tgtacagagtcatctgtgtgcacac

SEQ ID NO: 27130 - DNA, 25 bp, synthetic construct
  misc_feature 1..25: note = Oligonucleotide
  source 1..25: mol_type = other DNA
cactgtacagagtcatctgtgtgca

SEQ ID NO: 27131 - DNA, 25 bp, synthetic construct
  misc_feature 1..25: note = Oligonucleotide
  source 1..25: mol_type = other DNA
aatcactgtacagagtcatctgtgt

SEQ ID NO: 27132 - DNA, 25 bp, synthetic construct
  misc_feature 1..25: note = Oligonucleotide
  source 1..25: mol_type = other DNA
tacaatcactgtacagagtcatctg

SEQ ID NO: 27133 - DNA, 25 bp, synthetic construct
  misc_feature 1..25: note = Oligonucleotide
  source 1..25: mol_type = other DNA
gcatacaatcactgtacagagtcat

SEQ ID NO: 27134 - DNA, 25 bp, synthetic construct
  misc_feature 1..25: note = Oligonucleotide
  source 1..25: mol_type = other DNA
catgcatacaatcactgtacagagt

SEQ ID NO: 27135 - DNA, 25 bp, synthetic construct
  misc_feature 1..25: note = Oligonucleotide
  source 1..25: mol_type = other DNA
gtacatgcatacaatcactgtacag

SEQ ID NO: 27136 - DNA, 25 bp, synthetic construct
  misc_feature 1..25: note = Oligonucleotide
  source 1..25: mol_type = other DNA
ctggtacatgcatacaatcactgta

SEQ ID NO: 27137 - DNA, 25 bp, synthetic construct
  misc_feature 1..25: note = Oligonucleotide
  source 1..25: mol_type = other DNA
tcactggtacatgcatacaatcact

SEQ ID NO: 27138 - DNA, 25 bp, synthetic construct
  misc_feature 1..25: note = Oligonucleotide
  source 1..25: mol_type = other DNA
cactcactggtacatgcatacaatc

SEQ ID NO: 27139 - DNA, 25 bp, synthetic construct
  misc_feature 1..25: note = Oligonucleotide
  source 1..25: mol_type = other DNA
ccacactcactggtacatgcataca

SEQ ID NO: 27140 - DNA, 25 bp, synthetic construct
  misc_feature 1..25: note = Oligonucleotide
  source 1..25: mol_type = other DNA
tatccacactcactggtacatgcat

SEQ ID NO: 27141 - DNA, 25 bp, synthetic construct
  misc_feature 1..25: note = Oligonucleotide
  source 1..25: mol_type = other DNA
gtatatccacactcactggtacatg

SEQ ID NO: 27142 - DNA, 25 bp, synthetic construct
  misc_feature 1..25: note = Oligonucleotide
  source 1..25: mol_type = other DNA
caagtatatccacactcactggtac

SEQ ID NO: 27143 - DNA, 25 bp, synthetic construct
  misc_feature 1..25: note = Oligonucleotide
  source 1..25: mol_type = other DNA
agacaagtatatccacactcactgg

SEQ ID NO: 27144 - DNA, 25 bp, synthetic construct
  misc_feature 1..25: note = Oligonucleotide
  source 1..25: mol_type = other DNA
aacagacaagtatatccacactcac

SEQ ID NO: 27145 - DNA, 25 bp, synthetic construct
  misc_feature 1..25: note = Oligonucleotide
  source 1..25: mol_type = other DNA
cagaacagacaagtatatccacact

SEQ ID NO: 27146 - DNA, 25 bp, synthetic construct
  misc_feature 1..25: note = Oligonucleotide
  source 1..25: mol_type = other DNA
ccccagaacagacaagtatatccac

SEQ ID NO: 27147 - DNA, 25 bp, synthetic construct
  misc_feature 1..25: note = Oligonucleotide
  source 1..25: mol_type = other DNA
cacccccagaacagacaagtatatc

SEQ ID NO: 27148 - DNA, 25 bp, synthetic construct
  misc_feature 1..25: note = Oligonucleotide
  source 1..25: mol_type = other DNA
gtacacccccagaacagacaagtat

SEQ ID NO: 27149 - DNA, 25 bp, synthetic construct
  misc_feature 1..25: note = Oligonucleotide
  source 1..25: mol_type = other DNA
cacgtacacccccagaacagacaag

SEQ ID NO: 27150 - DNA, 25 bp, synthetic construct
  misc_feature 1..25: note = Oligonucleotide
  source 1..25: mol_type = other DNA
acacacgtacacccccagaacagac

SEQ ID NO: 27151 - DNA, 25 bp, synthetic construct
  misc_feature 1..25: note = Oligonucleotide
  source 1..25: mol_type = other DNA
caaacacacgtacacccccagaaca

SEQ ID NO: 27152 - DNA, 25 bp, synthetic construct
  misc_feature 1..25: note = Oligonucleotide
  source 1..25: mol_type = other DNA
acacaaacacacgtacacccccaga

SEQ ID NO: 27153 - DNA, 25 bp, synthetic construct
  misc_feature 1..25: note = Oligonucleotide
  source 1..25: mol_type = other DNA
tgcacacaaacacacgtacaccccc

SEQ ID NO: 27154 - DNA, 25 bp, synthetic construct
  misc_feature 1..25: note = Oligonucleotide
  source 1..25: mol_type = other DNA
gtgtgcacacaaacacacgtacacc

SEQ ID NO: 27155 - DNA, 25 bp, synthetic construct
  misc_feature 1..25: note = Oligonucleotide
  source 1..25: mol_type = other DNA
cctgtgtgcacacaaacacacgtac

SEQ ID NO: 27156 - DNA, 25 bp, synthetic construct
  misc_feature 1..25: note = Oligonucleotide
  source 1..25: mol_type = other DNA
tcacctgtgtgcacacaaacacacg

SEQ ID NO: 27157 - DNA, 25 bp, synthetic construct
  misc_feature 1..25: note = Oligonucleotide
  source 1..25: mol_type = other DNA
gggtcacctgtgtgcacacaaacac

SEQ ID NO: 27158 - DNA, 25 bp, synthetic construct
  misc_feature 1..25: note = Oligonucleotide
  source 1..25: mol_type = other DNA
acagggtcacctgtgtgcacacaaa

SEQ ID NO: 27159 - DNA, 25 bp, synthetic construct
  misc_feature 1..25: note = Oligonucleotide
  source 1..25: mol_type = other DNA
tgtacagggtcacctgtgtgcacac

SEQ ID NO: 27160 - DNA, 25 bp, synthetic construct
  misc_feature 1..25: note = Oligonucleotide
  source 1..25: mol_type = other DNA
cactgtacagggtcacctgtgtgca

SEQ ID NO: 27161 - DNA, 25 bp, synthetic construct
  misc_feature 1..25: note = Oligonucleotide
  source 1..25: mol_type = other DNA
aatcactgtacagggtcacctgtgt

SEQ ID NO: 27162 - DNA, 25 bp, synthetic construct
  misc_feature 1..25: note = Oligonucleotide
  source 1..25: mol_type = other DNA
tacaatcactgtacagggtcacctg

SEQ ID NO: 27163 - DNA, 25 bp, synthetic construct
  misc_feature 1..25: note = Oligonucleotide
  source 1..25: mol_type = other DNA
gtgtacaatcactgtacagggtcac

SEQ ID NO: 27164 - DNA, 25 bp, synthetic construct
  misc_feature 1..25: note = Oligonucleotide
  source 1..25: mol_type = other DNA
cacgtgtacaatcactgtacagggt

SEQ ID NO: 27165 - DNA, 25 bp, synthetic construct
  misc_feature 1..25: note = Oligonucleotide
  source 1..25: mol_type = other DNA
gtacacgtgtacaatcactgtacag

SEQ ID NO: 27166 - DNA, 25 bp, synthetic construct
  misc_feature 1..25: note = Oligonucleotide
  source 1..25: mol_type = other DNA
ctggtacacgtgtacaatcactgta

SEQ ID NO: 27167 - DNA, 25 bp, synthetic construct
  misc_feature 1..25: note = Oligonucleotide
  source 1..25: mol_type = other DNA
tccctggtacacgtgtacaatcact

SEQ ID NO: 27168 - DNA, 25 bp, synthetic construct
  misc_feature 1..25: note = Oligonucleotide
  source 1..25: mol_type = other DNA
cactccctggtacacgtgtacaatc

SEQ ID NO: 27169 - DNA, 25 bp, synthetic construct
  misc_feature 1..25: note = Oligonucleotide
  source 1..25: mol_type = other DNA
ccacactccctggtacacgtgtaca

SEQ ID NO: 27170 - DNA, 25 bp, synthetic construct
  misc_feature 1..25: note = Oligonucleotide
  source 1..25: mol_type = other DNA
tatccacactccctggtacacgtgt

SEQ ID NO: 27171 - DNA, 25 bp, synthetic construct
  misc_feature 1..25: note = Oligonucleotide
  source 1..25: mol_type = other DNA
gtatatccacactccctggtacacg

SEQ ID NO: 27172 - DNA, 25 bp, synthetic construct
  misc_feature 1..25: note = Oligonucleotide
  source 1..25: mol_type = other DNA
caagtatatccacactccctggtac

SEQ ID NO: 27173 - DNA, 25 bp, synthetic construct
  misc_feature 1..25: note = Oligonucleotide
  source 1..25: mol_type = other DNA
aggcaagtatatccacactccctgg

SEQ ID NO: 27174 - DNA, 25 bp, synthetic construct
  misc_feature 1..25: note = Oligonucleotide
  source 1..25: mol_type = other DNA
aacaggcaagtatatccacactccc

SEQ ID NO: 27175 - DNA, 25 bp, synthetic construct
  misc_feature 1..25: note = Oligonucleotide
  source 1..25: mol_type = other DNA
cagaacaggcaagtatatccacact

SEQ ID NO: 27176 - DNA, 25 bp, synthetic construct
  misc_feature 1..25: note = Oligonucleotide
  source 1..25: mol_type = other DNA
ccccagaacaggcaagtatatccac

SEQ ID NO: 27177 - DNA, 25 bp, synthetic construct
  misc_feature 1..25: note = Oligonucleotide
  source 1..25: mol_type = other DNA
cacccccagaacaggcaagtatatc

SEQ ID NO: 27178 - DNA, 25 bp, synthetic construct
  misc_feature 1..25: note = Oligonucleotide
  source 1..25: mol_type = other DNA
gtacacccccagaacaggcaagtat

SEQ ID NO: 27179 - DNA, 25 bp, synthetic construct
  misc_feature 1..25: note = Oligonucleotide
  source 1..25: mol_type = other DNA
cacgtacacccccagaacaggcaag

SEQ ID NO: 27180 - DNA, 25 bp, synthetic construct
  misc_feature 1..25: note = Oligonucleotide
  source 1..25: mol_type = other DNA
acacacgtacacccccagaacaggc

SEQ ID NO: 27181 - DNA, 25 bp, synthetic construct
  misc_feature 1..25: note = Oligonucleotide
  source 1..25: mol_type = other DNA
caaacacacgtacacccccagaaca

SEQ ID NO: 27182 - DNA, 25 bp, synthetic construct
  misc_feature 1..25: note = Oligonucleotide
  source 1..25: mol_type = other DNA
acacaaacacacgtacacccccaga

SEQ ID NO: 27183 - DNA, 25 bp, synthetic construct
  misc_feature 1..25: note = Oligonucleotide
  source 1..25: mol_type = other DNA
tgcacacaaacacacgtacaccccc

SEQ ID NO: 27184 - DNA, 25 bp, synthetic construct
  misc_feature 1..25: note = Oligonucleotide
  source 1..25: mol_type = other DNA
gtgtgcacacaaacacacgtacacc

SEQ ID NO: 27185 - DNA, 25 bp, synthetic construct
  misc_feature 1..25: note = Oligonucleotide
  source 1..25: mol_type = other DNA
cctgtgtgcacacaaacacacgtac

SEQ ID NO: 27186 - DNA, 25 bp, synthetic construct
  misc_feature 1..25: note = Oligonucleotide
  source 1..25: mol_type = other DNA
tcacctgtgtgcacacaaacacacg

SEQ ID NO: 27187 - DNA, 25 bp, synthetic construct
  misc_feature 1..25: note = Oligonucleotide
  source 1..25: mol_type = other DNA
gggtcacctgtgtgcacacaaacac

SEQ ID NO: 27188 - DNA, 25 bp, synthetic construct
  misc_feature 1..25: note = Oligonucleotide
  source 1..25: mol_type = other DNA
acagggtcacctgtgtgcacacaaa

SEQ ID NO: 27189 - DNA, 25 bp, synthetic construct
  misc_feature 1..25: note = Oligonucleotide
  source 1..25: mol_type = other DNA
tgtacagggtcacctgtgtgcacac

SEQ ID NO: 27190 - DNA, 25 bp, synthetic construct
  misc_feature 1..25: note = Oligonucleotide
  source 1..25: mol_type = other DNA
cactgtacagggtcacctgtgtgca

SEQ ID NO: 27191 - DNA, 25 bp, synthetic construct
  misc_feature 1..25: note = Oligonucleotide
  source 1..25: mol_type = other DNA
aatcactgtacagggtcacctgtgt

SEQ ID NO: 27192 - DNA, 25 bp, synthetic construct
  misc_feature 1..25: note = Oligonucleotide
  source 1..25: mol_type = other DNA
tgcaatcactgtacagggtcacctg

SEQ ID NO: 27193 - DNA, 25 bp, synthetic construct
  misc_feature 1..25: note = Oligonucleotide
  source 1..25: mol_type = other DNA
gcatgcaatcactgtacagggtcac

SEQ ID NO: 27194 - DNA, 25 bp, synthetic construct
  misc_feature 1..25: note = Oligonucleotide
  source 1..25: mol_type = other DNA
cacgcatgcaatcactgtacagggt

SEQ ID NO: 27195 - DNA, 25 bp, synthetic construct
  misc_feature 1..25: note = Oligonucleotide
  source 1..25: mol_type = other DNA
gtgcacgcatgcaatcactgtacag

SEQ ID NO: 27196 - DNA, 25 bp, synthetic construct
  misc_feature 1..25: note = Oligonucleotide
  source 1..25: mol_type = other DNA
ctggtgcacgcatgcaatcactgta

SEQ ID NO: 27197 - DNA, 25 bp, synthetic construct
  misc_feature 1..25: note = Oligonucleotide
  source 1..25: mol_type = other DNA
tccctggtgcacgcatgcaatcact

SEQ ID NO: 27198 - DNA, 25 bp, synthetic construct
  misc_feature 1..25: note = Oligonucleotide
  source 1..25: mol_type = other DNA
cactccctggtgcacgcatgcaatc

SEQ ID NO: 27199 - DNA, 25 bp, synthetic construct
  misc_feature 1..25: note = Oligonucleotide
  source 1..25: mol_type = other DNA
ccacactccctggtgcacgcatgca

SEQ ID NO: 27200 - DNA, 25 bp, synthetic construct
  misc_feature 1..25: note = Oligonucleotide
  source 1..25: mol_type = other DNA
tatccacactccctggtgcacgcat

SEQ ID NO: 27201 - DNA, 25 bp, synthetic construct
  misc_feature 1..25: note = Oligonucleotide
  source 1..25: mol_type = other DNA
gtatatccacactccctggtgcacg

SEQ ID NO: 27202 - DNA, 25 bp, synthetic construct
  misc_feature 1..25: note = Oligonucleotide
  source 1..25: mol_type = other DNA
caagtatatccacactccctggtgc

SEQ ID NO: 27203 - DNA, 25 bp, synthetic construct
  misc_feature 1..25: note = Oligonucleotide
  source 1..25: mol_type = other DNA
aggcaagtatatccacactccctgg

SEQ ID NO: 27204 - DNA, 25 bp, synthetic construct
  misc_feature 1..25: note = Oligonucleotide
  source 1..25: mol_type = other DNA
aacaggcaagtatatccacactccc

SEQ ID NO: 27205 - DNA, 25 bp, synthetic construct
  misc_feature 1..25: note = Oligonucleotide
  source 1..25: mol_type = other DNA
cagaacaggcaagtatatccacact

SEQ ID NO: 27206 - DNA, 25 bp, synthetic construct
  misc_feature 1..25: note = Oligonucleotide
  source 1..25: mol_type = other DNA
ccccagaacaggcaagtatatccac

SEQ ID NO: 27207 - DNA, 25 bp, synthetic construct
  misc_feature 1..25: note = Oligonucleotide
  source 1..25: mol_type = other DNA
cacccccagaacaggcaagtatatc

SEQ ID NO: 27208 - DNA, 25 bp, synthetic construct
  misc_feature 1..25: note = Oligonucleotide
  source 1..25: mol_type = other DNA
gtacacccccagaacaggcaagtat

SEQ ID NO: 27209 - DNA, 25 bp, synthetic construct
  misc_feature 1..25: note = Oligonucleotide
  source 1..25: mol_type = other DNA
cgtgtacacccccagaacaggcaag

SEQ ID NO: 27210 - DNA, 25 bp, synthetic construct
  misc_feature 1..25: note = Oligonucleotide
  source 1..25: mol_type = other DNA
acacgtgtacacccccagaacaggc

SEQ ID NO: 27211 - DNA, 25 bp, synthetic construct
  misc_feature 1..25: note = Oligonucleotide
  source 1..25: mol_type = other DNA
cacacacgtgtacacccccagaaca

SEQ ID NO: 27212 - DNA, 25 bp, synthetic construct
  misc_feature 1..25: note = Oligonucleotide
  source 1..25: mol_type = other DNA
gtgcacacacgtgtacacccccaga

SEQ ID NO: 27213 - DNA, 25 bp, synthetic construct
  misc_feature 1..25: note = Oligonucleotide
  source 1..25: mol_type = other DNA
tgtgtgcacacacgtgtacaccccc

SEQ ID NO: 27214 - DNA, 25 bp, synthetic construct
  misc_feature 1..25: note = Oligonucleotide
  source 1..25: mol_type = other DNA
atctgtgtgcacacacgtgtacacc

SEQ ID NO: 27215 - DNA, 25 bp, synthetic construct
  misc_feature 1..25: note = Oligonucleotide
  source 1..25: mol_type = other DNA
gtcatctgtgtgcacacacgtgtac

SEQ ID NO: 27216 - DNA, 25 bp, synthetic construct
  misc_feature 1..25: note = Oligonucleotide
  source 1..25: mol_type = other DNA
agggtcatctgtgtgcacacacgtg

SEQ ID NO: 27217 - DNA, 25 bp, synthetic construct
  misc_feature 1..25: note = Oligonucleotide
  source 1..25: mol_type = other DNA
tacagggtcatctgtgtgcacacac

SEQ ID NO: 27218 - DNA, 25 bp, synthetic construct
  misc_feature 1..25: note = Oligonucleotide
  source 1..25: mol_type = other DNA
ctgtacagggtcatctgtgtgcaca

SEQ ID NO: 27219 - DNA, 25 bp, synthetic construct
  misc_feature 1..25: note = Oligonucleotide
  source 1..25: mol_type = other DNA
tcactgtacagggtcatctgtgtgc

SEQ ID NO: 27220 - DNA, 25 bp, synthetic construct
  misc_feature 1..25: note = Oligonucleotide
  source 1..25: mol_type = other DNA
caatcactgtacagggtcatctgtg

SEQ ID NO: 27221 - DNA, 25 bp, synthetic construct
  misc_feature 1..25: note = Oligonucleotide
  source 1..25: mol_type = other DNA
gtacaatcactgtacagggtcatct

SEQ ID NO: 27222 - DNA, 25 bp, synthetic construct
  misc_feature 1..25: note = Oligonucleotide
  source 1..25: mol_type = other DNA
cgtgtacaatcactgtacagggtca

SEQ ID NO: 27223 - DNA, 25 bp, synthetic construct
  misc_feature 1..25: note = Oligonucleotide
  source 1..25: mol_type = other DNA
acacgtgtacaatcactgtacaggg

SEQ ID NO: 27224 - DNA, 25 bp, synthetic construct
  misc_feature 1..25: note = Oligonucleotide
  source 1..25: mol_type = other DNA
ggtacacgtgtacaatcactgtaca

SEQ ID NO: 27225 - DNA, 25 bp, synthetic construct
  misc_feature 1..25: note = Oligonucleotide
  source 1..25: mol_type = other DNA
cctggtacacgtgtacaatcactgt

SEQ ID NO: 27226 - DNA, 25 bp, synthetic construct
  misc_feature 1..25: note = Oligonucleotide
  source 1..25: mol_type = other DNA
ctccctggtacacgtgtacaatcac

SEQ ID NO: 27227 - DNA, 25 bp, synthetic construct
  misc_feature 1..25: note = Oligonucleotide
  source 1..25: mol_type = other DNA
acactccctggtacacgtgtacaat

SEQ ID NO: 27228 - DNA, 25 bp, synthetic construct
  misc_feature 1..25: note = Oligonucleotide
  source 1..25: mol_type = other DNA
tccacactccctggtacacgtgtac

SEQ ID NO: 27229 - DNA, 25 bp, synthetic construct
  misc_feature 1..25: note = Oligonucleotide
  source 1..25: mol_type = other DNA
atatccacactccctggtacacgtg

SEQ ID NO: 27230 - DNA, 25 bp, synthetic construct
  misc_feature 1..25: note = Oligonucleotide
  source 1..25: mol_type = other DNA
agtatatccacactccctggtacac

SEQ ID NO: 27231 - DNA, 25 bp, synthetic construct
  misc_feature 1..25: note = Oligonucleotide
  source 1..25: mol_type = other DNA
gcaagtatatccacactccctggta

SEQ ID NO: 27232 - DNA, 25 bp, synthetic construct
  misc_feature 1..25: note = Oligonucleotide
  source 1..25: mol_type = other DNA
caggcaagtatatccacactccctg

SEQ ID NO: 27233 - DNA, 25 bp, synthetic construct
  misc_feature 1..25: note = Oligonucleotide
  source 1..25: mol_type = other DNA
gaacaggcaagtatatccacactcc

SEQ ID NO: 27234 - DNA, 25 bp, synthetic construct
  misc_feature 1..25: note = Oligonucleotide
  source 1..25: mol_type = other DNA
ccagaacaggcaagtatatccacac

SEQ ID NO: 27235 - DNA, 25 bp, synthetic construct
  misc_feature 1..25: note = Oligonucleotide
  source 1..25: mol_type = other DNA
cccccagaacaggcaagtatatcca

SEQ ID NO: 27236 - DNA, 25 bp, synthetic construct
  misc_feature 1..25: note = Oligonucleotide
  source 1..25: mol_type = other DNA
acacccccagaacaggcaagtatat

SEQ ID NO: 27237 - DNA, 25 bp, synthetic construct
  misc_feature 1..25: note = Oligonucleotide
  source 1..25: mol_type = other DNA
tgtacacccccagaacaggcaagta

SEQ ID NO: 27238 - DNA, 25 bp, synthetic construct
  misc_feature 1..25: note = Oligonucleotide
  source 1..25: mol_type = other DNA
acgtgtacacccccagaacaggcaa

SEQ ID NO: 27239 - DNA, 25 bp, synthetic construct
  misc_feature 1..25: note = Oligonucleotide
  source 1..25: mol_type = other DNA
cacacgtgtacacccccagaacagg

SEQ ID NO: 27240 - DNA, 25 bp, synthetic construct
  misc_feature 1..25: note = Oligonucleotide
  source 1..25: mol_type = other DNA
aaacacacgtgtacacccccagaac

SEQ ID NO: 27241 - DNA, 25 bp, synthetic construct
  misc_feature 1..25: note = Oligonucleotide
  source 1..25: mol_type = other DNA
tgcaaacacacgtgtacacccccag

SEQ ID NO: 27242 - DNA, 25 bp, synthetic construct
  misc_feature 1..25: note = Oligonucleotide
  source 1..25: mol_type = other DNA
gtgtgcaaacacacgtgtacacccc

SEQ ID NO: 27243 - DNA, 25 bp, synthetic construct
  misc_feature 1..25: note = Oligonucleotide
  source 1..25: mol_type = other DNA
tctgtgtgcaaacacacgtgtacac

SEQ ID NO: 27244 - DNA, 25 bp, synthetic construct
  misc_feature 1..25: note = Oligonucleotide
  source 1..25: mol_type = other DNA
tcatctgtgtgcaaacacacgtgta

SEQ ID NO: 27245 - DNA, 25 bp, synthetic construct
  misc_feature 1..25: note = Oligonucleotide
  source 1..25: mol_type = other DNA
gggtcatctgtgtgcaaacacacgt

SEQ ID NO: 27246 - DNA, 25 bp, synthetic construct
  misc_feature 1..25: note = Oligonucleotide
  source 1..25: mol_type = other DNA
acagggtcatctgtgtgcaaacaca

SEQ ID NO: 27247 - DNA, 25 bp, synthetic construct
  misc_feature 1..25: note = Oligonucleotide
  source 1..25: mol_type = other DNA
tgtacagggtcatctgtgtgcaaac

SEQ ID NO: 27248 - DNA, 25 bp, synthetic construct
  misc_feature 1..25: note = Oligonucleotide
  source 1..25: mol_type = other DNA
cactgtacagggtcatctgtgtgca

SEQ ID NO: 27249 - DNA, 25 bp, synthetic construct
  misc_feature 1..25: note = Oligonucleotide
  source 1..25: mol_type = other DNA
aatcactgtacagggtcatctgtgt

SEQ ID NO: 27250 - DNA, 25 bp, synthetic construct
  misc_feature 1..25: note = Oligonucleotide
  source 1..25: mol_type = other DNA
tacaatcactgtacagggtcatctg

SEQ ID NO: 27251 - DNA, 25 bp, synthetic construct
  misc_feature 1..25: note = Oligonucleotide
  source 1..25: mol_type = other DNA
gtgtacaatcactgtacagggtcat

SEQ ID NO: 27252 - DNA, 25 bp, synthetic construct
  misc_feature 1..25: note = Oligonucleotide
  source 1..25: mol_type = other DNA
cacgtgtacaatcactgtacagggt

SEQ ID NO: 27253 - DNA, 25 bp, synthetic construct
  misc_feature 1..25: note = Oligonucleotide
  source 1..25: mol_type = other DNA
gtacacgtgtacaatcactgtacag

SEQ ID NO: 27254 - DNA, 25 bp, synthetic construct
  misc_feature 1..25: note = Oligonucleotide
  source 1..25: mol_type = other DNA
ctggtacacgtgtacaatcactgta

SEQ ID NO: 27255 - DNA, 25 bp, synthetic construct
  misc_feature 1..25: note = Oligonucleotide
  source 1..25: mol_type = other DNA
tccctggtacacgtgtacaatcact

SEQ ID NO: 27256 - DNA, 25 bp, synthetic construct
  misc_feature 1..25: note = Oligonucleotide
  source 1..25: mol_type = other DNA
cactccctggtacacgtgtacaatc

SEQ ID NO: 27257 - DNA, 25 bp, synthetic construct
  misc_feature 1..25: note = Oligonucleotide
  source 1..25: mol_type = other DNA
ccacactccctggtacacgtgtaca

SEQ ID NO: 27258 - DNA, 25 bp, synthetic construct
  misc_feature 1..25: note = Oligonucleotide
  source 1..25: mol_type = other DNA
tatccacactccctggtacacgtgt

SEQ ID NO: 27259 - DNA, 25 bp, synthetic construct
  misc_feature 1..25: note = Oligonucleotide
  source 1..25: mol_type = other DNA
gtatatccacactccctggtacacg

SEQ ID NO: 27260 - DNA, 25 bp, synthetic construct
  misc_feature 1..25: note = Oligonucleotide
  source 1..25: mol_type = other DNA
caagtatatccacactccctggtac

SEQ ID NO: 27261 - DNA, 25 bp, synthetic construct
  misc_feature 1..25: note = Oligonucleotide
  source 1..25: mol_type = other DNA
aggcaagtatatccacactccctgg

SEQ ID NO: 27262 - DNA, 25 bp, synthetic construct
  misc_feature 1..25: note = Oligonucleotide
  source 1..25: mol_type = other DNA
aacaggcaagtatatccacactccc

SEQ ID NO: 27263 - DNA, 25 bp, synthetic construct
  misc_feature 1..25: note = Oligonucleotide
  source 1..25: mol_type = other DNA
cagaacaggcaagtatatccacact

SEQ ID NO: 27264 - DNA, 25 bp, synthetic construct
  misc_feature 1..25: note = Oligonucleotide
  source 1..25: mol_type = other DNA
ccccagaacaggcaagtatatccac

SEQ ID NO: 27265 - DNA, 25 bp, synthetic construct
  misc_feature 1..25: note = Oligonucleotide
  source 1..25: mol_type = other DNA
cacccccagaacaggcaagtatatc

SEQ ID NO: 27266 - DNA, 25 bp, synthetic construct
  misc_feature 1..25: note = Oligonucleotide
  source 1..25: mol_type = other DNA
gtacacccccagaacaggcaagtat

SEQ ID NO: 27267 - DNA, 25 bp, synthetic construct
  misc_feature 1..25: note = Oligonucleotide
  source 1..25: mol_type = other DNA
cgtgtacacccccagaacaggcaag

SEQ ID NO: 27268 - DNA, 25 bp, synthetic construct
  misc_feature 1..25: note = Oligonucleotide
  source 1..25: mol_type = other DNA
acacgtgtacacccccagaacaggc

SEQ ID NO: 27269 - DNA, 25 bp, synthetic construct
  misc_feature 1..25: note = Oligonucleotide
  source 1..25: mol_type = other DNA
cacacacgtgtacacccccagaaca

SEQ ID NO: 27270 - DNA, 25 bp, synthetic construct
  misc_feature 1..25: note = Oligonucleotide
  source 1..25: mol_type = other DNA
gtgcacacacgtgtacacccccaga

SEQ ID NO: 27271 - DNA, 25 bp, synthetic construct
  misc_feature 1..25: note = Oligonucleotide
  source 1..25: mol_type = other DNA
tgtgtgcacacacgtgtacaccccc

SEQ ID NO: 27272 - DNA, 25 bp, synthetic construct
  misc_feature 1..25: note = Oligonucleotide
  source 1..25: mol_type = other DNA
atctgtgtgcacacacgtgtacacc

SEQ ID NO: 27273 - DNA, 25 bp, synthetic construct
  misc_feature 1..25: note = Oligonucleotide
  source 1..25: mol_type = other DNA
gtcatctgtgtgcacacacgtgtac

SEQ ID NO: 27274 - DNA, 25 bp, synthetic construct
  misc_feature 1..25: note = Oligonucleotide
  source 1..25: mol_type = other DNA
agggtcatctgtgtgcacacacgtg

SEQ ID NO: 27275 - DNA, 25 bp, synthetic construct
  misc_feature 1..25: note = Oligonucleotide
  source 1..25: mol_type = other DNA
tacagggtcatctgtgtgcacacac

SEQ ID NO: 27276 - DNA, 25 bp, synthetic construct
  misc_feature 1..25: note = Oligonucleotide
  source 1..25: mol_type = other DNA
ctgtacagggtcatctgtgtgcaca

SEQ ID NO: 27277 - DNA, 25 bp, synthetic construct
  misc_feature 1..25: note = Oligonucleotide
  source 1..25: mol_type = other DNA
tcactgtacagggtcatctgtgtgc

SEQ ID NO: 27278 - DNA, 25 bp, synthetic construct
  misc_feature 1..25: note = Oligonucleotide
  source 1..25: mol_type = other DNA
caatcactgtacagggtcatctgtg

SEQ ID NO: 27279 - DNA, 25 bp, synthetic construct
  misc_feature 1..25: note = Oligonucleotide
  source 1..25: mol_type = other DNA
gtacaatcactgtacagggtcatct

SEQ ID NO: 27280 - DNA, 25 bp, synthetic construct
  misc_feature 1..25: note = Oligonucleotide
  source 1..25: mol_type = other DNA
cgtgtacaatcactgtacagggtca

SEQ ID NO: 27281 - DNA, 25 bp, synthetic construct
  misc_feature 1..25: note = Oligonucleotide
  source 1..25: mol_type = other DNA
acacgtgtacaatcactgtacaggg

SEQ ID NO: 27282 - DNA, 25 bp, synthetic construct
  misc_feature 1..25: note = Oligonucleotide
  source 1..25: mol_type = other DNA
ggtacacgtgtacaatcactgtaca

SEQ ID NO: 27283 - DNA, 25 bp, synthetic construct
  misc_feature 1..25: note = Oligonucleotide
  source 1..25: mol_type = other DNA
cctggtacacgtgtacaatcactgt

SEQ ID NO: 27284 - DNA, 25 bp, synthetic construct
  misc_feature 1..25: note = Oligonucleotide
  source 1..25: mol_type = other DNA
ctccctggtacacgtgtacaatcac

SEQ ID NO: 27285 - DNA, 25 bp, synthetic construct
  misc_feature 1..25: note = Oligonucleotide
  source 1..25: mol_type = other DNA
acactccctggtacacgtgtacaat

SEQ ID NO: 27286 - DNA, 25 bp, synthetic construct
  misc_feature 1..25: note = Oligonucleotide
  source 1..25: mol_type = other DNA
tccacactccctggtacacgtgtac

SEQ ID NO: 27287 - DNA, 25 bp, synthetic construct
  misc_feature 1..25: note = Oligonucleotide
  source 1..25: mol_type = other DNA
atatccacactccctggtacacgtg

SEQ ID NO: 27288 - DNA, 25 bp, synthetic construct
  misc_feature 1..25: note = Oligonucleotide
  source 1..25: mol_type = other DNA
agtatatccacactccctggtacac

SEQ ID NO: 27289 - DNA, 25 bp, synthetic construct
  misc_feature 1..25: note = Oligonucleotide
  source 1..25: mol_type = other DNA
gcaagtatatccacactccctggta

SEQ ID NO: 27290 - DNA, 25 bp, synthetic construct
  misc_feature 1..25: note = Oligonucleotide
  source 1..25: mol_type = other DNA
caggcaagtatatccacactccctg

SEQ ID NO: 27291 - DNA, 25 bp, synthetic construct
  misc_feature 1..25: note = Oligonucleotide
  source 1..25: mol_type = other DNA
gaacaggcaagtatatccacactcc

SEQ ID NO: 27292 - DNA, 25 bp, synthetic construct
  misc_feature 1..25: note = Oligonucleotide
  source 1..25: mol_type = other DNA
ccagaacaggcaagtatatccacac

SEQ ID NO: 27293 - DNA, 25 bp, synthetic construct
  misc_feature 1..25: note = Oligonucleotide
  source 1..25: mol_type = other DNA
cccccagaacaggcaagtatatcca

SEQ ID NO: 27294 - DNA, 25 bp, synthetic construct
  misc_feature 1..25: note = Oligonucleotide
  source 1..25: mol_type = other DNA
acacccccagaacaggcaagtatat

SEQ ID NO: 27295 - DNA, 25 bp, synthetic construct
  misc_feature 1..25: note = Oligonucleotide
  source 1..25: mol_type = other DNA
tgtacacccccagaacaggcaagta

SEQ ID NO: 27296 - DNA, 25 bp, synthetic construct
  misc_feature 1..25: note = Oligonucleotide
  source 1..25: mol_type = other DNA
acgtgtacacccccagaacaggcaa

SEQ ID NO: 27297 - DNA, 25 bp, synthetic construct
  misc_feature 1..25: note = Oligonucleotide
  source 1..25: mol_type = other DNA
cacacgtgtacacccccagaacagg

SEQ ID NO: 27298 - DNA, 25 bp, synthetic construct
  misc_feature 1..25: note = Oligonucleotide
  source 1..25: mol_type = other DNA
aaacacacgtgtacacccccagaac

SEQ ID NO: 27299 - DNA, 25 bp, synthetic construct
  misc_feature 1..25: note = Oligonucleotide
  source 1..25: mol_type = other DNA
tgcaaacacacgtgtacacccccag

SEQ ID NO: 27300 - DNA, 25 bp, synthetic construct
  misc_feature 1..25: note = Oligonucleotide
  source 1..25: mol_type = other DNA
gtgtgcaaacacacgtgtacacccc

SEQ ID NO: 27301 - DNA, 25 bp, synthetic construct
  misc_feature 1..25: note = Oligonucleotide
  source 1..25: mol_type = other DNA
tctgtgtgcaaacacacgtgtacac

SEQ ID NO: 27302 - DNA, 25 bp, synthetic construct
  misc_feature 1..25: note = Oligonucleotide
  source 1..25: mol_type = other DNA
tcatctgtgtgcaaacacacgtgta

SEQ ID NO: 27303 - DNA, 25 bp, synthetic construct
  misc_feature 1..25: note = Oligonucleotide
  source 1..25: mol_type = other DNA
gggtcatctgtgtgcaaacacacgt

SEQ ID NO: 27304 - DNA, 25 bp, synthetic construct
  misc_feature 1..25: note = Oligonucleotide
  source 1..25: mol_type = other DNA
acagggtcatctgtgtgcaaacaca

SEQ ID NO: 27305 - DNA, 25 bp, synthetic construct
  misc_feature 1..25: note = Oligonucleotide
  source 1..25: mol_type = other DNA
tgtacagggtcatctgtgtgcaaac

SEQ ID NO: 27306 - DNA, 25 bp, synthetic construct
  misc_feature 1..25: note = Oligonucleotide
  source 1..25: mol_type = other DNA
cactgtacagggtcatctgtgtgca

SEQ ID NO: 27307 - DNA, 25 bp, synthetic construct
  misc_feature 1..25: note = Oligonucleotide
  source 1..25: mol_type = other DNA
aatcactgtacagggtcatctgtgt

SEQ ID NO: 27308 - DNA, 25 bp, synthetic construct
  misc_feature 1..25: note = Oligonucleotide
  source 1..25: mol_type = other DNA
tacaatcactgtacagggtcatctg

SEQ ID NO: 27309 - DNA, 25 bp, synthetic construct
  misc_feature 1..25: note = Oligonucleotide
  source 1..25: mol_type = other DNA
gtgtacaatcactgtacagggtcat

SEQ ID NO: 27310 - DNA, 25 bp, synthetic construct
  misc_feature 1..25: note = Oligonucleotide
  source 1..25: mol_type = other DNA
cacgtgtacaatcactgtacagggt

SEQ ID NO: 27311 - DNA, 25 bp, synthetic construct
  misc_feature 1..25: note = Oligonucleotide
  source 1..25: mol_type = other DNA
gtacacgtgtacaatcactgtacag

SEQ ID NO: 27312 - DNA, 25 bp, synthetic construct
  misc_feature 1..25: note = Oligonucleotide
  source 1..25: mol_type = other DNA
ctggtacacgtgtacaatcactgta

SEQ ID NO: 27313 - DNA, 25 bp, synthetic construct
  misc_feature 1..25: note = Oligonucleotide
  source 1..25: mol_type = other DNA
tccctggtacacgtgtacaatcact

SEQ ID NO: 27314 - DNA, 25 bp, synthetic construct
  misc_feature 1..25: note = Oligonucleotide
  source 1..25: mol_type = other DNA
cactccctggtacacgtgtacaatc

SEQ ID NO: 27315 - DNA, 25 bp, synthetic construct
  misc_feature 1..25: note = Oligonucleotide
  source 1..25: mol_type = other DNA
ccacactccctggtacacgtgtaca

SEQ ID NO: 27316 - DNA, 25 bp, synthetic construct
  misc_feature 1..25: note = Oligonucleotide
  source 1..25: mol_type = other DNA
tatccacactccctggtacacgtgt

SEQ ID NO: 27317 - DNA, 25 bp, synthetic construct
  misc_feature 1..25: note = Oligonucleotide
  source 1..25: mol_type = other DNA
gtatatccacactccctggtacacg

SEQ ID NO: 27318 - DNA, 25 bp, synthetic construct
  misc_feature 1..25: note = Oligonucleotide
  source 1..25: mol_type = other DNA
caagtatatccacactccctggtac

SEQ ID NO: 27319 - DNA, 25 bp, synthetic construct
  misc_feature 1..25: note = Oligonucleotide
  source 1..25: mol_type = other DNA
aggcaagtatatccacactccctgg

SEQ ID NO: 27320 - DNA, 25 bp, synthetic construct
  misc_feature 1..25: note = Oligonucleotide
  source 1..25: mol_type = other DNA
aacaggcaagtatatccacactccc

SEQ ID NO: 27321 - DNA, 25 bp, synthetic construct
  misc_feature 1..25: note = Oligonucleotide
  source 1..25: mol_type = other DNA
cagaacaggcaagtatatccacact

SEQ ID NO: 27322 - DNA, 25 bp, synthetic construct
  misc_feature 1..25: note = Oligonucleotide
  source 1..25: mol_type = other DNA
ccccagaacaggcaagtatatccac

SEQ ID NO: 27323 - DNA, 25 bp, synthetic construct
  misc_feature 1..25: note = Oligonucleotide
  source 1..25: mol_type = other DNA
cacccccagaacaggcaagtatatc

SEQ ID NO: 27324 - DNA, 25 bp, synthetic construct
  misc_feature 1..25: note = Oligonucleotide
  source 1..25: mol_type = other DNA
gtacacccccagaacaggcaagtat

SEQ ID NO: 27325 - DNA, 25 bp, synthetic construct
  misc_feature 1..25: note = Oligonucleotide
  source 1..25: mol_type = other DNA
catgtacacccccagaacaggcaag

SEQ ID NO: 27326 - DNA, 25 bp, synthetic construct
  misc_feature 1..25: note = Oligonucleotide
  source 1..25: mol_type = other DNA
acacatgtacacccccagaacaggc

SEQ ID NO: 27327 - DNA, 25 bp, synthetic construct
  misc_feature 1..25: note = Oligonucleotide
  source 1..25: mol_type = other DNA
cacacacatgtacacccccagaaca

SEQ ID NO: 27328 - DNA, 25 bp, synthetic construct
  misc_feature 1..25: note = Oligonucleotide
  source 1..25: mol_type = other DNA
gtgcacacacatgtacacccccaga

SEQ ID NO: 27329 - DNA, 25 bp, synthetic construct
  misc_feature 1..25: note = Oligonucleotide
  source 1..25: mol_type = other DNA
tgtgtgcacacacatgtacaccccc

SEQ ID NO: 27330 - DNA, 25 bp, synthetic construct
  misc_feature 1..25: note = Oligonucleotide
  source 1..25: mol_type = other DNA
atctgtgtgcacacacatgtacacc

SEQ ID NO: 27331 - DNA, 25 bp, synthetic construct
  misc_feature 1..25: note = Oligonucleotide
  source 1..25: mol_type = other DNA
gtcatctgtgtgcacacacatgtac

SEQ ID NO: 27332 - DNA, 25 bp, synthetic construct
  misc_feature 1..25: note = Oligonucleotide
  source 1..25: mol_type = other DNA
agggtcatctgtgtgcacacacatg

SEQ ID NO: 27333 - DNA, 25 bp, synthetic construct
  misc_feature 1..25: note = Oligonucleotide
  source 1..25: mol_type = other DNA
tacagggtcatctgtgtgcacacac

SEQ ID NO: 27334 - DNA, 25 bp, synthetic construct
  misc_feature 1..25: note = Oligonucleotide
  source 1..25: mol_type = other DNA
ctgtacagggtcatctgtgtgcaca

SEQ ID NO: 27335 - DNA, 25 bp, synthetic construct
  misc_feature 1..25: note = Oligonucleotide
  source 1..25: mol_type = other DNA
tcactgtacagggtcatctgtgtgc

SEQ ID NO: 27336 - DNA, 25 bp, synthetic construct
  misc_feature 1..25: note = Oligonucleotide
  source 1..25: mol_type = other DNA
caatcactgtacagggtcatctgtg

SEQ ID NO: 27337 - DNA, 25 bp, synthetic construct
  misc_feature 1..25: note = Oligonucleotide
  source 1..25: mol_type = other DNA
atgcaatcactgtacagggtcatct

SEQ ID NO: 27338 - DNA, 25 bp, synthetic construct
  misc_feature 1..25: note = Oligonucleotide
  source 1..25: mol_type = other DNA
cgcatgcaatcactgtacagggtca

SEQ ID NO: 27339 - DNA, 25 bp, synthetic construct
  misc_feature 1..25: note = Oligonucleotide
  source 1..25: mol_type = other DNA
gcacgcatgcaatcactgtacaggg

SEQ ID NO: 27340 - DNA, 25 bp, synthetic construct
  misc_feature 1..25: note = Oligonucleotide
  source 1..25: mol_type = other DNA
agtgcacgcatgcaatcactgtaca

SEQ ID NO: 27341 - DNA, 25 bp, synthetic construct
  misc_feature 1..25: note = Oligonucleotide
  source 1..25: mol_type = other DNA
cctagtgcacgcatgcaatcactgt

SEQ ID NO: 27342 - DNA, 25 bp, synthetic construct
  misc_feature 1..25: note = Oligonucleotide
  source 1..25: mol_type = other DNA
ctccctagtgcacgcatgcaatcac

SEQ ID NO: 27343 - DNA, 25 bp, synthetic construct
  misc_feature 1..25: note = Oligonucleotide
  source 1..25: mol_type = other DNA
acactccctagtgcacgcatgcaat

SEQ ID NO: 27344 - DNA, 25 bp, synthetic construct
  misc_feature 1..25: note = Oligonucleotide
  source 1..25: mol_type = other DNA
tccacactccctagtgcacgcatgc

SEQ ID NO: 27345 - DNA, 25 bp, synthetic construct
  misc_feature 1..25: note = Oligonucleotide
  source 1..25: mol_type = other DNA
atatccacactccctagtgcacgca

SEQ ID NO: 27346 - DNA, 25 bp, synthetic construct
  misc_feature 1..25: note = Oligonucleotide
  source 1..25: mol_type = other DNA
agtatatccacactccctagtgcac

SEQ ID NO: 27347 - DNA, 25 bp, synthetic construct
  misc_feature 1..25: note = Oligonucleotide
  source 1..25: mol_type = other DNA
gcaagtatatccacactccctagtg

SEQ ID NO: 27348 - DNA, 25 bp, synthetic construct
  misc_feature 1..25: note = Oligonucleotide
  source 1..25: mol_type = other DNA
caggcaagtatatccacactcccta

SEQ ID NO: 27349 - DNA, 25 bp, synthetic construct
  misc_feature 1..25: note = Oligonucleotide
  source 1..25: mol_type = other DNA
gaacaggcaagtatatccacactcc

SEQ ID NO: 27350 - DNA, 25 bp, synthetic construct
  misc_feature 1..25: note = Oligonucleotide
  source 1..25: mol_type = other DNA
ccagaacaggcaagtatatccacac

SEQ ID NO: 27351 - DNA, 25 bp, synthetic construct
  misc_feature 1..25: note = Oligonucleotide
  source 1..25: mol_type = other DNA
cccccagaacaggcaagtatatcca

SEQ ID NO: 27352 - DNA, 25 bp, synthetic construct
  misc_feature 1..25: note = Oligonucleotide
  source 1..25: mol_type = other DNA
acacccccagaacaggcaagtatat

SEQ ID NO: 27353 - DNA, 25 bp, synthetic construct
  misc_feature 1..25: note = Oligonucleotide
  source 1..25: mol_type = other DNA
tgtacacccccagaacaggcaagta

SEQ ID NO: 27354 - DNA, 25 bp, synthetic construct
  misc_feature 1..25: note = Oligonucleotide
  source 1..25: mol_type = other DNA
atgtgtacacccccagaacaggcaa

SEQ ID NO: 27355 - DNA, 25 bp, synthetic construct
  misc_feature 1..25: note = Oligonucleotide
  source 1..25: mol_type = other DNA
cacatgtgtacacccccagaacagg

SEQ ID NO: 27356 - DNA, 25 bp, synthetic construct
  misc_feature 1..25: note = Oligonucleotide
  source 1..25: mol_type = other DNA
aaacacatgtgtacacccccagaac

SEQ ID NO: 27357 - DNA, 25 bp, synthetic construct
  misc_feature 1..25: note = Oligonucleotide
  source 1..25: mol_type = other DNA
tgcaaacacatgtgtacacccccag

SEQ ID NO: 27358 - DNA, 25 bp, synthetic construct
  misc_feature 1..25: note = Oligonucleotide
  source 1..25: mol_type = other DNA
gtgtgcaaacacatgtgtacacccc

SEQ ID NO: 27359 - DNA, 25 bp, synthetic construct
  misc_feature 1..25: note = Oligonucleotide
  source 1..25: mol_type = other DNA
tctgtgtgcaaacacatgtgtacac

SEQ ID NO: 27360 - DNA, 25 bp, synthetic construct
  misc_feature 1..25: note = Oligonucleotide
  source 1..25: mol_type = other DNA
tcatctgtgtgcaaacacatgtgta

SEQ ID NO: 27361 - DNA, 25 bp, synthetic construct
  misc_feature 1..25: note = Oligonucleotide
  source 1..25: mol_type = other DNA
gggtcatctgtgtgcaaacacatgt

SEQ ID NO: 27362 - DNA, 25 bp, synthetic construct
  misc_feature 1..25: note = Oligonucleotide
  source 1..25: mol_type = other DNA
acagggtcatctgtgtgcaaacaca

SEQ ID NO: 27363 - DNA, 25 bp, synthetic construct
  misc_feature 1..25: note = Oligonucleotide
  source 1..25: mol_type = other DNA
tgtacagggtcatctgtgtgcaaac

SEQ ID NO: 27364 - DNA, 25 bp, synthetic construct
  misc_feature 1..25: note = Oligonucleotide
  source 1..25: mol_type = other DNA
cactgtacagggtcatctgtgtgca

SEQ ID NO: 27365 - DNA, 25 bp, synthetic construct
  misc_feature 1..25: note = Oligonucleotide
  source 1..25: mol_type = other DNA
aatcactgtacagggtcatctgtgt

SEQ ID NO: 27366 - DNA, 25 bp, synthetic construct
  misc_feature 1..25: note = Oligonucleotide
  source 1..25: mol_type = other DNA
tacaatcactgtacagggtcatctg

SEQ ID NO: 27367 - DNA, 25 bp, synthetic construct
  misc_feature 1..25: note = Oligonucleotide
  source 1..25: mol_type = other DNA
gtgtacaatcactgtacagggtcat

SEQ ID NO: 27368 - DNA, 25 bp, synthetic construct
  misc_feature 1..25: note = Oligonucleotide
  source 1..25: mol_type = other DNA
cacgtgtacaatcactgtacagggt

SEQ ID NO: 27369 - DNA, 25 bp, synthetic construct
  misc_feature 1..25: note = Oligonucleotide
  source 1..25: mol_type = other DNA
atacacgtgtacaatcactgtacag

SEQ ID NO: 27370 - DNA, 25 bp, synthetic construct
  misc_feature 1..25: note = Oligonucleotide
  source 1..25: mol_type = other DNA
ctgatacacgtgtacaatcactgta

SEQ ID NO: 27371 - DNA, 25 bp, synthetic construct
  misc_feature 1..25: note = Oligonucleotide
  source 1..25: mol_type = other DNA
tccctgatacacgtgtacaatcact

SEQ ID NO: 27372 - DNA, 25 bp, synthetic construct
  misc_feature 1..25: note = Oligonucleotide
  source 1..25: mol_type = other DNA
cactccctgatacacgtgtacaatc

SEQ ID NO: 27373 - DNA, 25 bp, synthetic construct
  misc_feature 1..25: note = Oligonucleotide
  source 1..25: mol_type = other DNA
ccacactccctgatacacgtgtaca

SEQ ID NO: 27374 - DNA, 25 bp, synthetic construct
  misc_feature 1..25: note = Oligonucleotide
  source 1..25: mol_type = other DNA
tatccacactccctgatacacgtgt

SEQ ID NO: 27375 - DNA, 25 bp, synthetic construct
  misc_feature 1..25: note = Oligonucleotide
  source 1..25: mol_type = other DNA
gtatatccacactccctgatacacg

SEQ ID NO: 27376 - DNA, 25 bp, synthetic construct
  misc_feature 1..25: note = Oligonucleotide
  source 1..25: mol_type = other DNA
caagtatatccacactccctgatac

SEQ ID NO: 27377 - DNA, 25 bp, synthetic construct
  misc_feature 1..25: note = Oligonucleotide
  source 1..25: mol_type = other DNA
aggcaagtatatccacactccctga

SEQ ID NO: 27378 - DNA, 25 bp, synthetic construct
  misc_feature 1..25: note = Oligonucleotide
  source 1..25: mol_type = other DNA
aacaggcaagtatatccacactccc

SEQ ID NO: 27379 - DNA, 25 bp, synthetic construct
  misc_feature 1..25: note = Oligonucleotide
  source 1..25: mol_type = other DNA
cagaacaggcaagtatatccacact

SEQ ID NO: 27380 - DNA, 25 bp, synthetic construct
  misc_feature 1..25: note = Oligonucleotide
  source 1..25: mol_type = other DNA
ccccagaacaggcaagtatatccac

SEQ ID NO: 27381 - DNA, 25 bp, synthetic construct
  misc_feature 1..25: note = Oligonucleotide
  source 1..25: mol_type = other DNA
cacccccagaacaggcaagtatatc

SEQ ID NO: 27382 - DNA, 25 bp, synthetic construct
  misc_feature 1..25: note = Oligonucleotide
  source 1..25: mol_type = other DNA
gtacacccccagaacaggcaagtat

SEQ ID NO: 27383 - DNA, 25 bp, synthetic construct
  misc_feature 1..25: note = Oligonucleotide
  source 1..25: mol_type = other DNA
cgtgtacacccccagaacaggcaag

SEQ ID NO: 27384 - DNA, 25 bp, synthetic construct
  misc_feature 1..25: note = Oligonucleotide
  source 1..25: mol_type = other DNA
acacgtgtacacccccagaacaggc

SEQ ID NO: 27385 - DNA, 25 bp, synthetic construct
  misc_feature 1..25: note = Oligonucleotide
  source 1..25: mol_type = other DNA
aacacacgtgtacacccccagaaca

SEQ ID NO: 27386 - DNA, 25 bp, synthetic construct
  misc_feature 1..25: note = Oligonucleotide
  source 1..25: mol_type = other DNA
gcaaacacacgtgtacacccccaga

SEQ ID NO: 27387 - DNA, 25 bp, synthetic construct
  misc_feature 1..25: note = Oligonucleotide
  source 1..25: mol_type = other DNA
tgtgcaaacacacgtgtacaccccc

SEQ ID NO: 27388 - DNA, 25 bp, synthetic construct
  misc_feature 1..25: note = Oligonucleotide
  source 1..25: mol_type = other DNA
ctgtgtgcaaacacacgtgtacacc

SEQ ID NO: 27389 - DNA, 25 bp, synthetic construct
  misc_feature 1..25: note = Oligonucleotide
  source 1..25: mol_type = other DNA
catctgtgtgcaaacacacgtgtac

SEQ ID NO: 27390 - DNA, 25 bp, synthetic construct
  misc_feature 1..25: note = Oligonucleotide
  source 1..25: mol_type = other DNA
ggtcatctgtgtgcaaacacacgtg

SEQ ID NO: 27391 - DNA, 25 bp, synthetic construct
  misc_feature 1..25: note = Oligonucleotide
  source 1..25: mol_type = other DNA
cagggtcatctgtgtgcaaacacac

SEQ ID NO: 27392 - DNA, 25 bp, synthetic construct
  misc_feature 1..25: note = Oligonucleotide
  source 1..25: mol_type = other DNA
gtacagggtcatctgtgtgcaaaca

SEQ ID NO: 27393 - DNA, 25 bp, synthetic construct
  misc_feature 1..25: note = Oligonucleotide
  source 1..25: mol_type = other DNA
actgtacagggtcatctgtgtgcaa

SEQ ID NO: 27394 - DNA, 25 bp, synthetic construct
  misc_feature 1..25: note = Oligonucleotide
  source 1..25: mol_type = other DNA
atcactgtacagggtcatctgtgtg

SEQ ID NO: 27395 - DNA, 25 bp, synthetic construct
  misc_feature 1..25: note = Oligonucleotide
  source 1..25: mol_type = other DNA
acaatcactgtacagggtcatctgt

SEQ ID NO: 27396 - DNA, 25 bp, synthetic construct
  misc_feature 1..25: note = Oligonucleotide
  source 1..25: mol_type = other DNA
tgtacaatcactgtacagggtcatc

SEQ ID NO: 27397 - DNA, 25 bp, synthetic construct
  misc_feature 1..25: note = Oligonucleotide
  source 1..25: mol_type = other DNA
acgtgtacaatcactgtacagggtc

SEQ ID NO: 27398 - DNA, 25 bp, synthetic construct
  misc_feature 1..25: note = Oligonucleotide
  source 1..25: mol_type = other DNA
tacacgtgtacaatcactgtacagg

SEQ ID NO: 27399 - DNA, 25 bp, synthetic construct
  misc_feature 1..25: note = Oligonucleotide
  source 1..25: mol_type = other DNA
tggtacacgtgtacaatcactgtac

SEQ ID NO: 27400 - DNA, 25 bp, synthetic construct
  misc_feature 1..25: note = Oligonucleotide
  source 1..25: mol_type = other DNA
ccctggtacacgtgtacaatcactg

SEQ ID NO: 27401 - DNA, 25 bp, synthetic construct
  misc_feature 1..25: note = Oligonucleotide
  source 1..25: mol_type = other DNA
actccctggtacacgtgtacaatca

SEQ ID NO: 27402 - DNA, 25 bp, synthetic construct
  misc_feature 1..25: note = Oligonucleotide
  source 1..25: mol_type = other DNA
cacactccctggtacacgtgtacaa

SEQ ID NO: 27403 - DNA, 25 bp, synthetic construct
  misc_feature 1..25: note = Oligonucleotide
  source 1..25: mol_type = other DNA
atccacactccctggtacacgtgta

SEQ ID NO: 27404 - DNA, 25 bp, synthetic construct
  misc_feature 1..25: note = Oligonucleotide
  source 1..25: mol_type = other DNA
tatatccacactccctggtacacgt

SEQ ID NO: 27405 - DNA, 25 bp, synthetic construct
  misc_feature 1..25: note = Oligonucleotide
  source 1..25: mol_type = other DNA
aagtatatccacactccctggtaca

SEQ ID NO: 27406 - DNA, 25 bp, synthetic construct
  misc_feature 1..25: note = Oligonucleotide
  source 1..25: mol_type = other DNA
ggcaagtatatccacactccctggt

SEQ ID NO: 27407 - DNA, 25 bp, synthetic construct
  misc_feature 1..25: note = Oligonucleotide
  source 1..25: mol_type = other DNA
acaggcaagtatatccacactccct

SEQ ID NO: 27408 - DNA, 25 bp, synthetic construct
  misc_feature 1..25: note = Oligonucleotide
  source 1..25: mol_type = other DNA
agaacaggcaagtatatccacactc

SEQ ID NO: 27409 - DNA, 25 bp, synthetic construct
  misc_feature 1..25: note = Oligonucleotide
  source 1..25: mol_type = other DNA
cccagaacaggcaagtatatccaca

SEQ ID NO: 27410 - DNA, 25 bp, synthetic construct
  misc_feature 1..25: note = Oligonucleotide
  source 1..25: mol_type = other DNA
acccccagaacaggcaagtatatcc

SEQ ID NO: 27411 - DNA, 25 bp, synthetic construct
  misc_feature 1..25: note = Oligonucleotide
  source 1..25: mol_type = other DNA
tacacccccagaacaggcaagtata

SEQ ID NO: 27412 - DNA, 25 bp, synthetic construct
  misc_feature 1..25: note = Oligonucleotide
  source 1..25: mol_type = other DNA
atgtacacccccagaacaggcaagt

SEQ ID NO: 27413 - DNA, 25 bp, synthetic construct
  misc_feature 1..25: note = Oligonucleotide
  source 1..25: mol_type = other DNA
cacatgtacacccccagaacaggca

SEQ ID NO: 27414 - DNA, 25 bp, synthetic construct
  misc_feature 1..25: note = Oligonucleotide
  source 1..25: mol_type = other DNA
acacacatgtacacccccagaacag

SEQ ID NO: 27415 - DNA, 25 bp, synthetic construct
  misc_feature 1..25: note = Oligonucleotide
  source 1..25: mol_type = other DNA
tgcacacacatgtacacccccagaa

SEQ ID NO: 27416 - DNA, 25 bp, synthetic construct
  misc_feature 1..25: note = Oligonucleotide
  source 1..25: mol_type = other DNA
gtgtgcacacacatgtacaccccca

SEQ ID NO: 27417 - DNA, 25 bp, synthetic construct
  misc_feature 1..25: note = Oligonucleotide
  source 1..25: mol_type = other DNA
tctgtgtgcacacacatgtacaccc

SEQ ID NO: 27418 - DNA, 25 bp, synthetic construct
  misc_feature 1..25: note = Oligonucleotide
  source 1..25: mol_type = other DNA
tcatctgtgtgcacacacatgtaca

SEQ ID NO: 27419 - DNA, 25 bp, synthetic construct
  misc_feature 1..25: note = Oligonucleotide
  source 1..25: mol_type = other DNA
gggtcatctgtgtgcacacacatgt

SEQ ID NO: 27420 - DNA, 25 bp, synthetic construct
  misc_feature 1..25: note = Oligonucleotide
  source 1..25: mol_type = other DNA
acagggtcatctgtgtgcacacaca

SEQ ID NO: 27421 - DNA, 25 bp, synthetic construct
  misc_feature 1..25: note = Oligonucleotide
  source 1..25: mol_type = other DNA
tgtacagggtcatctgtgtgcacac

SEQ ID NO: 27422 - DNA, 25 bp, synthetic construct
  misc_feature 1..25: note = Oligonucleotide
  source 1..25: mol_type = other DNA
cactgtacagggtcatctgtgtgca

SEQ ID NO: 27423 - DNA, 25 bp, synthetic construct
  misc_feature 1..25: note = Oligonucleotide
  source 1..25: mol_type = other DNA
aatcactgtacagggtcatctgtgt

SEQ ID NO: 27424 - DNA, 25 bp, synthetic construct
  misc_feature 1..25: note = Oligonucleotide
  source 1..25: mol_type = other DNA
tgcaatcactgtacagggtcatctg

SEQ ID NO: 27425 - DNA, 25 bp, synthetic construct
  misc_feature 1..25: note = Oligonucleotide
  source 1..25: mol_type = other DNA
gcatgcaatcactgtacagggtcat

SEQ ID NO: 27426 - DNA, 25 bp, synthetic construct
  misc_feature 1..25: note = Oligonucleotide
  source 1..25: mol_type = other DNA
cacgcatgcaatcactgtacagggt

SEQ ID NO: 27427 - DNA, 25 bp, synthetic construct
  misc_feature 1..25: note = Oligonucleotide
  source 1..25: mol_type = other DNA
gtgcacgcatgcaatcactgtacag

SEQ ID NO: 27428 - DNA, 25 bp, synthetic construct
  misc_feature 1..25: note = Oligonucleotide
  source 1..25: mol_type = other DNA
ctggtgcacgcatgcaatcactgta

SEQ ID NO: 27429 - DNA, 25 bp, synthetic construct
  misc_feature 1..25: note = Oligonucleotide
  source 1..25: mol_type = other DNA
tccctggtgcacgcatgcaatcact

SEQ ID NO: 27430 - DNA, 25 bp, synthetic construct
  misc_feature 1..25: note = Oligonucleotide
  source 1..25: mol_type = other DNA
cactccctggtgcacgcatgcaatc

SEQ ID NO: 27431 - DNA, 25 bp, synthetic construct
  misc_feature 1..25: note = Oligonucleotide
  source 1..25: mol_type = other DNA
ccacactccctggtgcacgcatgca

SEQ ID NO: 27432 - DNA, 25 bp, synthetic construct
  misc_feature 1..25: note = Oligonucleotide
  source 1..25: mol_type = other DNA
tatccacactccctggtgcacgcat

SEQ ID NO: 27433 - DNA, 25 bp, synthetic construct
  misc_feature 1..25: note = Oligonucleotide
  source 1..25: mol_type = other DNA
gtatatccacactccctggtgcacg

SEQ ID NO: 27434 - DNA, 25 bp, synthetic construct
  misc_feature 1..25: note = Oligonucleotide
  source 1..25: mol_type = other DNA
caagtatatccacactccctggtgc

SEQ ID NO: 27435 - DNA, 25 bp, synthetic construct
  misc_feature 1..25: note = Oligonucleotide
  source 1..25: mol_type = other DNA
aggcaagtatatccacactccctgg

SEQ ID NO: 27436 - DNA, 25 bp, synthetic construct
  misc_feature 1..25: note = Oligonucleotide
  source 1..25: mol_type = other DNA
aacaggcaagtatatccacactccc

SEQ ID NO: 27437 - DNA, 25 bp, synthetic construct
  misc_feature 1..25: note = Oligonucleotide
  source 1..25: mol_type = other DNA
cagaacaggcaagtatatccacact

SEQ ID NO: 27438 - DNA, 25 bp, synthetic construct
  misc_feature 1..25: note = Oligonucleotide
  source 1..25: mol_type = other DNA
ccccagaacaggcaagtatatccac

SEQ ID NO: 27439 - DNA, 25 bp, synthetic construct
  misc_feature 1..25: note = Oligonucleotide
  source 1..25: mol_type = other DNA
cacccccagaacaggcaagtatatc

SEQ ID NO: 27440 - DNA, 25 bp, synthetic construct
  misc_feature 1..25: note = Oligonucleotide
  source 1..25: mol_type = other DNA
gtacacccccagaacaggcaagtat

SEQ ID NO: 27441 - DNA, 25 bp, synthetic construct
  misc_feature 1..25: note = Oligonucleotide
  source 1..25: mol_type = other DNA
cgtgtacacccccagaacaggcaag

SEQ ID NO: 27442 - DNA, 25 bp, synthetic construct
  misc_feature 1..25: note = Oligonucleotide
  source 1..25: mol_type = other DNA
acacgtgtacacccccagaacaggc

SEQ ID NO: 27443 - DNA, 25 bp, synthetic construct
  misc_feature 1..25: note = Oligonucleotide
  source 1..25: mol_type = other DNA
cacacacgtgtacacccccagaaca

SEQ ID NO: 27444 - DNA, 25 bp, synthetic construct
  misc_feature 1..25: note = Oligonucleotide
  source 1..25: mol_type = other DNA
gcacacacacgtgtacacccccaga

SEQ ID NO: 27445 - DNA, 25 bp, synthetic construct
  misc_feature 1..25: note = Oligonucleotide
  source 1..25: mol_type = other DNA
tgtgcacacacacgtgtacaccccc

SEQ ID NO: 27446 - DNA, 25 bp, synthetic construct
  misc_feature 1..25: note = Oligonucleotide
  source 1..25: mol_type = other DNA
ctgtgtgcacacacacgtgtacacc

SEQ ID NO: 27447 - DNA, 25 bp, synthetic construct
  misc_feature 1..25: note = Oligonucleotide
  source 1..25: mol_type = other DNA
cacctgtgtgcacacacacgtgtac

SEQ ID NO: 27448 - DNA, 25 bp, synthetic construct
  misc_feature 1..25: note = Oligonucleotide
  source 1..25: mol_type = other DNA
ggtcacctgtgtgcacacacacgtg

SEQ ID NO: 27449 - DNA, 25 bp, synthetic construct
  misc_feature 1..25: note = Oligonucleotide
  source 1..25: mol_type = other DNA
cagggtcacctgtgtgcacacacac

SEQ ID NO: 27450 - DNA, 25 bp, synthetic construct
  misc_feature 1..25: note = Oligonucleotide
  source 1..25: mol_type = other DNA
gtacagggtcacctgtgtgcacaca

SEQ ID NO: 27451 - DNA, 25 bp, synthetic construct
  misc_feature 1..25: note = Oligonucleotide
  source 1..25: mol_type = other DNA
actgtacagggtcacctgtgtgcac

SEQ ID NO: 27452 - DNA, 25 bp, synthetic construct
  misc_feature 1..25: note = Oligonucleotide
  source 1..25: mol_type = other DNA
atcactgtacagggtcacctgtgtg

SEQ ID NO: 27453 - DNA, 25 bp, synthetic construct
  misc_feature 1..25: note = Oligonucleotide
  source 1..25: mol_type = other DNA
gcaatcactgtacagggtcacctgt

SEQ ID NO: 27454 - DNA, 25 bp, synthetic construct
  misc_feature 1..25: note = Oligonucleotide
  source 1..25: mol_type = other DNA
catgcaatcactgtacagggtcacc

SEQ ID NO: 27455 - DNA, 25 bp, synthetic construct
  misc_feature 1..25: note = Oligonucleotide
  source 1..25: mol_type = other DNA
acgcatgcaatcactgtacagggtc

SEQ ID NO: 27456 - DNA, 25 bp, synthetic construct
  misc_feature 1..25: note = Oligonucleotide
  source 1..25: mol_type = other DNA
tgcacgcatgcaatcactgtacagg

SEQ ID NO: 27457 - DNA, 25 bp, synthetic construct
  misc_feature 1..25: note = Oligonucleotide
  source 1..25: mol_type = other DNA
tggtgcacgcatgcaatcactgtac

SEQ ID NO: 27458 - DNA, 25 bp, synthetic construct
  misc_feature 1..25: note = Oligonucleotide
  source 1..25: mol_type = other DNA
ccctggtgcacgcatgcaatcactg

SEQ ID NO: 27459 - DNA, 25 bp, synthetic construct
  misc_feature 1..25: note = Oligonucleotide
  source 1..25: mol_type = other DNA
actccctggtgcacgcatgcaatca

SEQ ID NO: 27460 - DNA, 25 bp, synthetic construct
  misc_feature 1..25: note = Oligonucleotide
  source 1..25: mol_type = other DNA
cacactccctggtgcacgcatgcaa

SEQ ID NO: 27461 - DNA, 25 bp, synthetic construct
  misc_feature 1..25: note = Oligonucleotide
  source 1..25: mol_type = other DNA
atccacactccctggtgcacgcatg

SEQ ID NO: 27462 - DNA, 25 bp, synthetic construct
  misc_feature 1..25: note = Oligonucleotide
  source 1..25: mol_type = other DNA
tatatccacactccctggtgcacgc

SEQ ID NO: 27463 - DNA, 25 bp, synthetic construct
  misc_feature 1..25: note = Oligonucleotide
  source 1..25: mol_type = other DNA
aagtatatccacactccctggtgca

SEQ ID NO: 27464 - DNA, 25 bp, synthetic construct
  misc_feature 1..25: note = Oligonucleotide
  source 1..25: mol_type = other DNA
ggcaagtatatccacactccctggt

SEQ ID NO: 27465 - DNA, 25 bp, synthetic construct
  misc_feature 1..25: note = Oligonucleotide
  source 1..25: mol_type = other DNA
acaggcaagtatatccacactccct

SEQ ID NO: 27466 - DNA, 25 bp, synthetic construct
  misc_feature 1..25: note = Oligonucleotide
  source 1..25: mol_type = other DNA
agaacaggcaagtatatccacactc

SEQ ID NO: 27467 - DNA, 25 bp, synthetic construct
  misc_feature 1..25: note = Oligonucleotide
  source 1..25: mol_type = other DNA
cccagaacaggcaagtatatccaca

SEQ ID NO: 27468 - DNA, 25 bp, synthetic construct
  misc_feature 1..25: note = Oligonucleotide
  source 1..25: mol_type = other DNA
acccccagaacaggcaagtatatcc

SEQ ID NO: 27469 - DNA, 25 bp, synthetic construct
  misc_feature 1..25: note = Oligonucleotide
  source 1..25: mol_type = other DNA
tacacccccagaacaggcaagtata

SEQ ID NO: 27470 - DNA, 25 bp, synthetic construct
  misc_feature 1..25: note = Oligonucleotide
  source 1..25: mol_type = other DNA
gtgtacacccccagaacaggcaagt

SEQ ID NO: 27471 - DNA, 25 bp, synthetic construct
  misc_feature 1..25: note = Oligonucleotide
  source 1..25: mol_type = other DNA
cacgtgtacacccccagaacaggca

SEQ ID NO: 27472 - DNA, 25 bp, synthetic construct
  misc_feature 1..25: note = Oligonucleotide
  source 1..25: mol_type = other DNA
acacacgtgtacacccccagaacag

SEQ ID NO: 27473 - DNA, 25 bp, synthetic construct
  misc_feature 1..25: note = Oligonucleotide
  source 1..25: mol_type = other DNA
cacacacacgtgtacacccccagaa

SEQ ID NO: 27474 - DNA, 25 bp, synthetic construct
  misc_feature 1..25: note = Oligonucleotide
  source 1..25: mol_type = other DNA
gtgcacacacacgtgtacaccccca

SEQ ID NO: 27475 - DNA, 25 bp, synthetic construct
  misc_feature 1..25: note = Oligonucleotide
  source 1..25: mol_type = other DNA
tgtgtgcacacacacgtgtacaccc

SEQ ID NO: 27476 - DNA, 25 bp, synthetic construct
  misc_feature 1..25: note = Oligonucleotide
  source 1..25: mol_type = other DNA
acctgtgtgcacacacacgtgtaca

SEQ ID NO: 27477 - DNA, 25 bp, synthetic construct
  misc_feature 1..25: note = Oligonucleotide
  source 1..25: mol_type = other DNA
atcacctgtgtgcacacacacgtgt

SEQ ID NO: 27478 - DNA, 25 bp, synthetic construct
  misc_feature 1..25: note = Oligonucleotide
  source 1..25: mol_type = other DNA
aggatcacctgtgtgcacacacacg

SEQ ID NO: 27479 - DNA, 25 bp, synthetic construct
  misc_feature 1..25: note = Oligonucleotide
  source 1..25: mol_type = other DNA
tacaggatcacctgtgtgcacacac

SEQ ID NO: 27480 - DNA, 25 bp, synthetic construct
  misc_feature 1..25: note = Oligonucleotide
  source 1..25: mol_type = other DNA
ctgtacaggatcacctgtgtgcaca

SEQ ID NO: 27481 - DNA, 25 bp, synthetic construct
  misc_feature 1..25: note = Oligonucleotide
  source 1..25: mol_type = other DNA
tcactgtacaggatcacctgtgtgc

SEQ ID NO: 27482 - DNA, 25 bp, synthetic construct
  misc_feature 1..25: note = Oligonucleotide
  source 1..25: mol_type = other DNA
caatcactgtacaggatcacctgtg

SEQ ID NO: 27483 - DNA, 25 bp, synthetic construct
  misc_feature 1..25: note = Oligonucleotide
  source 1..25: mol_type = other DNA
atgcaatcactgtacaggatcacct

SEQ ID NO: 27484 - DNA, 25 bp, synthetic construct
  misc_feature 1..25: note = Oligonucleotide
  source 1..25: mol_type = other DNA
cgcatgcaatcactgtacaggatca

SEQ ID NO: 27485 - DNA, 25 bp, synthetic construct
  misc_feature 1..25: note = Oligonucleotide
  source 1..25: mol_type = other DNA
gcacgcatgcaatcactgtacagga

SEQ ID NO: 27486 - DNA, 25 bp, synthetic construct
  misc_feature 1..25: note = Oligonucleotide
  source 1..25: mol_type = other DNA
ggtgcacgcatgcaatcactgtaca

SEQ ID NO: 27487 - DNA, 25 bp, synthetic construct
  misc_feature 1..25: note = Oligonucleotide
  source 1..25: mol_type = other DNA
cctggtgcacgcatgcaatcactgt

SEQ ID NO: 27488 - DNA, 25 bp, synthetic construct
  misc_feature 1..25: note = Oligonucleotide
  source 1..25: mol_type = other DNA
ctccctggtgcacgcatgcaatcac

SEQ ID NO: 27489 - DNA, 25 bp, synthetic construct
  misc_feature 1..25: note = Oligonucleotide
  source 1..25: mol_type = other DNA
acactccctggtgcacgcatgcaat

SEQ ID NO: 27490 - DNA, 25 bp, synthetic construct
  misc_feature 1..25: note = Oligonucleotide
  source 1..25: mol_type = other DNA
tccacactccctggtgcacgcatgc

SEQ ID NO: 27491 - DNA, 25 bp, synthetic construct
  misc_feature 1..25: note = Oligonucleotide
  source 1..25: mol_type = other DNA
atatccacactccctggtgcacgca

SEQ ID NO: 27492 - DNA, 25 bp, synthetic construct
  misc_feature 1..25: note = Oligonucleotide
  source 1..25: mol_type = other DNA
agtatatccacactccctggtgcac

SEQ ID NO: 27493 - DNA, 25 bp, synthetic construct
  misc_feature 1..25: note = Oligonucleotide
  source 1..25: mol_type = other DNA
gcaagtatatccacactccctggtg

SEQ ID NO: 27494 - DNA, 25 bp, synthetic construct
  misc_feature 1..25: note = Oligonucleotide
  source 1..25: mol_type = other DNA
caggcaagtatatccacactccctg

SEQ ID NO: 27495 - DNA, 25 bp, synthetic construct
  misc_feature 1..25: note = Oligonucleotide
  source 1..25: mol_type = other DNA
gaacaggcaagtatatccacactcc

SEQ ID NO: 27496 - DNA, 25 bp, synthetic construct
  misc_feature 1..25: note = Oligonucleotide
  source 1..25: mol_type = other DNA
ccagaacaggcaagtatatccacac

SEQ ID NO: 27497 - DNA, 25 bp, synthetic construct
  misc_feature 1..25: note = Oligonucleotide
  source 1..25: mol_type = other DNA
cccccagaacaggcaagtatatcca

SEQ ID NO: 27498 - DNA, 25 bp, synthetic construct
  misc_feature 1..25: note = Oligonucleotide
  source 1..25: mol_type = other DNA
acacccccagaacaggcaagtatat

SEQ ID NO: 27499 - DNA, 25 bp, synthetic construct
  misc_feature 1..25: note = Oligonucleotide
  source 1..25: mol_type = other DNA
tgtacacccccagaacaggcaagta

SEQ ID NO: 27500 - DNA, 25 bp, synthetic construct
  misc_feature 1..25: note = Oligonucleotide
  source 1..25: mol_type = other DNA
atgtgtacacccccagaacaggcaa

SEQ ID NO: 27501 - DNA, 25 bp, synthetic construct
  misc_feature 1..25: note = Oligonucleotide
  source 1..25: mol_type = other DNA
cacatgtgtacacccccagaacagg

SEQ ID NO: 27502 - DNA, 25 bp, synthetic construct
  misc_feature 1..25: note = Oligonucleotide
  source 1..25: mol_type = other DNA
aaacacatgtgtacacccccagaac

SEQ ID NO: 27503 - DNA, 25 bp, synthetic construct
  misc_feature 1..25: note = Oligonucleotide
  source 1..25: mol_type = other DNA
tgcaaacacatgtgtacacccccag

SEQ ID NO: 27504 - DNA, 25 bp, synthetic construct
  misc_feature 1..25: note = Oligonucleotide
  source 1..25: mol_type = other DNA
gtgtgcaaacacatgtgtacacccc

SEQ ID NO: 27505 - DNA, 25 bp, synthetic construct
  misc_feature 1..25: note = Oligonucleotide
  source 1..25: mol_type = other DNA
tctgtgtgcaaacacatgtgtacac

SEQ ID NO: 27506 - DNA, 25 bp, synthetic construct
  misc_feature 1..25: note = Oligonucleotide
  source 1..25: mol_type = other DNA
tcatctgtgtgcaaacacatgtgta

SEQ ID NO: 27507 - DNA, 25 bp, synthetic construct
  misc_feature 1..25: note = Oligonucleotide
  source 1..25: mol_type = other DNA
gggtcatctgtgtgcaaacacatgt

SEQ ID NO: 27508 - DNA, 25 bp, synthetic construct
  misc_feature 1..25: note = Oligonucleotide
  source 1..25: mol_type = other DNA
acagggtcatctgtgtgcaaacaca

SEQ ID NO: 27509 - DNA, 25 bp, synthetic construct
  misc_feature 1..25: note = Oligonucleotide
  source 1..25: mol_type = other DNA
tgtacagggtcatctgtgtgcaaac

SEQ ID NO: 27510 - DNA, 25 bp, synthetic construct
  misc_feature 1..25: note = Oligonucleotide
  source 1..25: mol_type = other DNA
cactgtacagggtcatctgtgtgca

SEQ ID NO: 27511 - DNA, 25 bp, synthetic construct
  misc_feature 1..25: note = Oligonucleotide
  source 1..25: mol_type = other DNA
aatcactgtacagggtcatctgtgt

SEQ ID NO: 27512 - DNA, 25 bp, synthetic construct
  misc_feature 1..25: note = Oligonucleotide
  source 1..25: mol_type = other DNA
tgcaatcactgtacagggtcatctg

SEQ ID NO: 27513 - DNA, 25 bp, synthetic construct
  misc_feature 1..25: note = Oligonucleotide
  source 1..25: mol_type = other DNA
gcatgcaatcactgtacagggtcat

SEQ ID NO: 27514 - DNA, 25 bp, synthetic construct
  misc_feature 1..25: note = Oligonucleotide
  source 1..25: mol_type = other DNA
cacgcatgcaatcactgtacagggt

SEQ ID NO: 27515 - DNA, 25 bp, synthetic construct
  misc_feature 1..25: note = Oligonucleotide
  source 1..25: mol_type = other DNA
gtgcacgcatgcaatcactgtacag

SEQ ID NO: 27516 - DNA, 25 bp, synthetic construct
  misc_feature 1..25: note = Oligonucleotide
  source 1..25: mol_type = other DNA
ctggtgcacgcatgcaatcactgta

SEQ ID NO: 27517 - DNA, 25 bp, synthetic construct
  misc_feature 1..25: note = Oligonucleotide
  source 1..25: mol_type = other DNA
tccctggtgcacgcatgcaatcact

SEQ ID NO: 27518 - DNA, 25 bp, synthetic construct
  misc_feature 1..25: note = Oligonucleotide
  source 1..25: mol_type = other DNA
cactccctggtgcacgcatgcaatc

SEQ ID NO: 27519 - DNA, 25 bp, synthetic construct
  misc_feature 1..25: note = Oligonucleotide
  source 1..25: mol_type = other DNA
ccacactccctggtgcacgcatgca

SEQ ID NO: 27520 - DNA, 25 bp, synthetic construct
  misc_feature 1..25: note = Oligonucleotide
  source 1..25: mol_type = other DNA
tatccacactccctggtgcacgcat

SEQ ID NO: 27521 - DNA, 25 bp, synthetic construct
  misc_feature 1..25: note = Oligonucleotide
  source 1..25: mol_type = other DNA
gtatatccacactccctggtgcacg

SEQ ID NO: 27522 - DNA, 25 bp, synthetic construct
  misc_feature 1..25: note = Oligonucleotide
  source 1..25: mol_type = other DNA
caagtatatccacactccctggtgc

SEQ ID NO: 27523 - DNA, 25 bp, synthetic construct
  misc_feature 1..25: note = Oligonucleotide
  source 1..25: mol_type = other DNA
aggcaagtatatccacactccctgg

SEQ ID NO: 27524 - DNA, 25 bp, synthetic construct
  misc_feature 1..25: note = Oligonucleotide
  source 1..25: mol_type = other DNA
aacaggcaagtatatccacactccc

SEQ ID NO: 27525 - DNA, 25 bp, synthetic construct
  misc_feature 1..25: note = Oligonucleotide
  source 1..25: mol_type = other DNA
cagaacaggcaagtatatccacact

SEQ ID NO: 27526 - DNA, 25 bp, synthetic construct
  misc_feature 1..25: note = Oligonucleotide
  source 1..25: mol_type = other DNA
ccccagaacaggcaagtatatccac

SEQ ID NO: 27527 - DNA, 25 bp, synthetic construct
  misc_feature 1..25: note = Oligonucleotide
  source 1..25: mol_type = other DNA
cacccccagaacaggcaagtatatc

SEQ ID NO: 27528 - DNA, 25 bp, synthetic construct
  misc_feature 1..25: note = Oligonucleotide
  source 1..25: mol_type = other DNA
gtacacccccagaacaggcaagtat

SEQ ID NO: 27529 - DNA, 25 bp, synthetic construct
  misc_feature 1..25: note = Oligonucleotide
  source 1..25: mol_type = other DNA
cgtgtacacccccagaacaggcaag

SEQ ID NO: 27530 - DNA, 25 bp, synthetic construct
  misc_feature 1..25: note = Oligonucleotide
  source 1..25: mol_type = other DNA
acacgtgtacacccccagaacaggc

SEQ ID NO: 27531 - DNA, 25 bp, synthetic construct
  misc_feature 1..25: note = Oligonucleotide
  source 1..25: mol_type = other DNA
cacacacgtgtacacccccagaaca

SEQ ID NO: 27532 - DNA, 25 bp, synthetic construct
  misc_feature 1..25: note = Oligonucleotide
  source 1..25: mol_type = other DNA
gcacacacacgtgtacacccccaga

SEQ ID NO: 27533 - DNA, 25 bp, synthetic construct
  misc_feature 1..25: note = Oligonucleotide
  source 1..25: mol_type = other DNA
tgtgcacacacacgtgtacaccccc

SEQ ID NO: 27534 - DNA, 25 bp, synthetic construct
  misc_feature 1..25: note = Oligonucleotide
  source 1..25: mol_type = other DNA
ctgtgtgcacacacacgtgtacacc

SEQ ID NO: 27535 - DNA, 25 bp, synthetic construct
  misc_feature 1..25: note = Oligonucleotide
  source 1..25: mol_type = other DNA
cacctgtgtgcacacacacgtgtac

SEQ ID NO: 27536 - DNA, 25 bp, synthetic construct
  misc_feature 1..25: note = Oligonucleotide
  source 1..25: mol_type = other DNA
ggtcacctgtgtgcacacacacgtg

SEQ ID NO: 27537 - DNA, 25 bp, synthetic construct
  misc_feature 1..25: note = Oligonucleotide
  source 1..25: mol_type = other DNA
cagggtcacctgtgtgcacacacac

SEQ ID NO: 27538 - DNA, 25 bp, synthetic construct
  misc_feature 1..25: note = Oligonucleotide
  source 1..25: mol_type = other DNA
gtacagggtcacctgtgtgcacaca

SEQ ID NO: 27539 - DNA, 25 bp, synthetic construct
  misc_feature 1..25: note = Oligonucleotide
  source 1..25: mol_type = other DNA
actgtacagggtcacctgtgtgcac

SEQ ID NO: 27540 - DNA, 25 bp, synthetic construct
  misc_feature 1..25: note = Oligonucleotide
  source 1..25: mol_type = other DNA
atcactgtacagggtcacctgtgtg

SEQ ID NO: 27541 - DNA, 25 bp, synthetic construct
  misc_feature 1..25: note = Oligonucleotide
  source 1..25: mol_type = other DNA
gcaatcactgtacagggtcacctgt

SEQ ID NO: 27542 - DNA, 25 bp, synthetic construct
  misc_feature 1..25: note = Oligonucleotide
  source 1..25: mol_type = other DNA
catgcaatcactgtacagggtcacc

SEQ ID NO: 27543 - DNA, 25 bp, synthetic construct
  misc_feature 1..25: note = Oligonucleotide
  source 1..25: mol_type = other DNA
acgcatgcaatcactgtacagggtc

SEQ ID NO: 27544 - DNA, 25 bp, synthetic construct
  misc_feature 1..25: note = Oligonucleotide
  source 1..25: mol_type = other DNA
tgcacgcatgcaatcactgtacagg

SEQ ID NO: 27545 - DNA, 25 bp, synthetic construct
  misc_feature 1..25: note = Oligonucleotide
  source 1..25: mol_type = other DNA
tggtgcacgcatgcaatcactgtac

SEQ ID NO: 27546 - DNA, 25 bp, synthetic construct
  misc_feature 1..25: note = Oligonucleotide
  source 1..25: mol_type = other DNA
ccctggtgcacgcatgcaatcactg

SEQ ID NO: 27547 - DNA, 25 bp, synthetic construct
  misc_feature 1..25: note = Oligonucleotide
  source 1..25: mol_type = other DNA
actccctggtgcacgcatgcaatca

SEQ ID NO: 27548 - DNA, 25 bp, synthetic construct
  misc_feature 1..25: note = Oligonucleotide
  source 1..25: mol_type = other DNA
cacactccctggtgcacgcatgcaa

SEQ ID NO: 27549 - DNA, 25 bp, synthetic construct
  misc_feature 1..25: note = Oligonucleotide
  source 1..25: mol_type = other DNA
atccacactccctggtgcacgcatg

SEQ ID NO: 27550 - DNA, 25 bp, synthetic construct
  misc_feature 1..25: note = Oligonucleotide
  source 1..25: mol_type = other DNA
tatatccacactccctggtgcacgc

SEQ ID NO: 27551 - DNA, 25 bp, synthetic construct
  misc_feature 1..25: note = Oligonucleotide
  source 1..25: mol_type = other DNA
aagtatatccacactccctggtgca

SEQ ID NO: 27552 - DNA, 25 bp, synthetic construct
  misc_feature 1..25: note = Oligonucleotide
  source 1..25: mol_type = other DNA
ggcaagtatatccacactccctggt

SEQ ID NO: 27553 - DNA, 25 bp, synthetic construct
  misc_feature 1..25: note = Oligonucleotide
  source 1..25: mol_type = other DNA
acaggcaagtatatccacactccct

SEQ ID NO: 27554 - DNA, 25 bp, synthetic construct
  misc_feature 1..25: note = Oligonucleotide
  source 1..25: mol_type = other DNA
agaacaggcaagtatatccacactc

SEQ ID NO: 27555 - DNA, 25 bp, synthetic construct
  misc_feature 1..25: note = Oligonucleotide
  source 1..25: mol_type = other DNA
cccagaacaggcaagtatatccaca

SEQ ID NO: 27556 - DNA, 25 bp, synthetic construct
  misc_feature 1..25: note = Oligonucleotide
  source 1..25: mol_type = other DNA
acccccagaacaggcaagtatatcc

SEQ ID NO: 27557 - DNA, 25 bp, synthetic construct
  misc_feature 1..25: note = Oligonucleotide
  source 1..25: mol_type = other DNA
tacacccccagaacaggcaagtata

SEQ ID NO: 27558 - DNA, 25 bp, synthetic construct
  misc_feature 1..25: note = Oligonucleotide
  source 1..25: mol_type = other DNA
gtgtacacccccagaacaggcaagt

SEQ ID NO: 27559 - DNA, 25 bp, synthetic construct
  misc_feature 1..25: note = Oligonucleotide
  source 1..25: mol_type = other DNA
cacgtgtacacccccagaacaggca

SEQ ID NO: 27560 - DNA, 25 bp, synthetic construct
  misc_feature 1..25: note = Oligonucleotide
  source 1..25: mol_type = other DNA
acacacgtgtacacccccagaacag

SEQ ID NO: 27561 - DNA, 25 bp, synthetic construct
  misc_feature 1..25: note = Oligonucleotide
  source 1..25: mol_type = other DNA
cacacacacgtgtacacccccagaa

SEQ ID NO: 27562 - DNA, 25 bp, synthetic construct
  misc_feature 1..25: note = Oligonucleotide
  source 1..25: mol_type = other DNA
gtgcacacacacgtgtacaccccca

SEQ ID NO: 27563 - DNA, 25 bp, synthetic construct
  misc_feature 1..25: note = Oligonucleotide
  source 1..25: mol_type = other DNA
tgtgtgcacacacacgtgtacaccc

SEQ ID NO: 27564 - DNA, 25 bp, synthetic construct
  misc_feature 1..25: note = Oligonucleotide
  source 1..25: mol_type = other DNA
acctgtgtgcacacacacgtgtaca

SEQ ID NO: 27565 - DNA, 25 bp, synthetic construct
  misc_feature 1..25: note = Oligonucleotide
  source 1..25: mol_type = other DNA
gtcacctgtgtgcacacacacgtgt

SEQ ID NO: 27566 - DNA, 25 bp, synthetic construct
  misc_feature 1..25: note = Oligonucleotide
  source 1..25: mol_type = other DNA
agggtcacctgtgtgcacacacacg

SEQ ID NO: 27567 - DNA, 25 bp, synthetic construct
  misc_feature 1..25: note = Oligonucleotide
  source 1..25: mol_type = other DNA
tacagggtcacctgtgtgcacacac

SEQ ID NO: 27568 - DNA, 25 bp, synthetic construct
  misc_feature 1..25: note = Oligonucleotide
  source 1..25: mol_type = other DNA
ctgtacagggtcacctgtgtgcaca

SEQ ID NO: 27569 - DNA, 25 bp, synthetic construct
  misc_feature 1..25: note = Oligonucleotide
  source 1..25: mol_type = other DNA
tcactgtacagggtcacctgtgtgc

SEQ ID NO: 27570 - DNA, 25 bp, synthetic construct
  misc_feature 1..25: note = Oligonucleotide
  source 1..25: mol_type = other DNA
caatcactgtacagggtcacctgtg

SEQ ID NO: 27571 - DNA, 25 bp, synthetic construct
  misc_feature 1..25: note = Oligonucleotide
  source 1..25: mol_type = other DNA
atgcaatcactgtacagggtcacct

SEQ ID NO: 27572 - DNA, 25 bp, synthetic construct
  misc_feature 1..25: note = Oligonucleotide
  source 1..25: mol_type = other DNA
cgcatgcaatcactgtacagggtca

SEQ ID NO: 27573 - DNA, 25 bp, synthetic construct
  misc_feature 1..25: note = Oligonucleotide
  source 1..25: mol_type = other DNA
gcacgcatgcaatcactgtacaggg

SEQ ID NO: 27574 - DNA, 25 bp, synthetic construct
  misc_feature 1..25: note = Oligonucleotide
  source 1..25: mol_type = other DNA
ggtgcacgcatgcaatcactgtaca

SEQ ID NO: 27575 - DNA, 25 bp, synthetic construct
  misc_feature 1..25: note = Oligonucleotide
  source 1..25: mol_type = other DNA
cctggtgcacgcatgcaatcactgt

SEQ ID NO: 27576 - DNA, 25 bp, synthetic construct
  misc_feature 1..25: note = Oligonucleotide
  source 1..25: mol_type = other DNA
ctccctggtgcacgcatgcaatcac

SEQ ID NO: 27577 - DNA, 25 bp, synthetic construct
  misc_feature 1..25: note = Oligonucleotide
  source 1..25: mol_type = other DNA
acactccctggtgcacgcatgcaat

SEQ ID NO: 27578 - DNA, 25 bp, synthetic construct
  misc_feature 1..25: note = Oligonucleotide
  source 1..25: mol_type = other DNA
tccacactccctggtgcacgcatgc

SEQ ID NO: 27579 - DNA, 25 bp, synthetic construct
  misc_feature 1..25: note = Oligonucleotide
  source 1..25: mol_type = other DNA
atatccacactccctggtgcacgca

SEQ ID NO: 27580 - DNA, 25 bp, synthetic construct
  misc_feature 1..25: note = Oligonucleotide
  source 1..25: mol_type = other DNA
agtatatccacactccctggtgcac

SEQ ID NO: 27581 - DNA, 25 bp, synthetic construct
  misc_feature 1..25: note = Oligonucleotide
  source 1..25: mol_type = other DNA
gcaagtatatccacactccctggtg

SEQ ID NO: 27582 - DNA, 25 bp, synthetic construct
  misc_feature 1..25: note = Oligonucleotide
  source 1..25: mol_type = other DNA
caggcaagtatatccacactccctg

SEQ ID NO: 27583 - DNA, 25 bp, synthetic construct
  misc_feature 1..25: note = Oligonucleotide
  source 1..25: mol_type = other DNA
gaacaggcaagtatatccacactcc

SEQ ID NO: 27584 - DNA, 25 bp, synthetic construct
  misc_feature 1..25: note = Oligonucleotide
  source 1..25: mol_type = other DNA
ccagaacaggcaagtatatccacac

SEQ ID NO: 27585 - DNA, 25 bp, synthetic construct
  misc_feature 1..25: note = Oligonucleotide
  source 1..25: mol_type = other DNA
cccccagaacaggcaagtatatcca

SEQ ID NO: 27586 - DNA, 25 bp, synthetic construct
  misc_feature 1..25: note = Oligonucleotide
  source 1..25: mol_type = other DNA
acacccccagaacaggcaagtatat

SEQ ID NO: 27587 - DNA, 25 bp, synthetic construct
  misc_feature 1..25: note = Oligonucleotide
  source 1..25: mol_type = other DNA
tgtacacccccagaacaggcaagta

SEQ ID NO: 27588 - DNA, 25 bp, synthetic construct
  misc_feature 1..25: note = Oligonucleotide
  source 1..25: mol_type = other DNA
acatgtacacccccagaacaggcaa

SEQ ID NO: 27589 - DNA, 25 bp, synthetic construct
  misc_feature 1..25: note = Oligonucleotide
  source 1..25: mol_type = other DNA
cacacatgtacacccccagaacagg

SEQ ID NO: 27590 - DNA, 25 bp, synthetic construct
  misc_feature 1..25: note = Oligonucleotide
  source 1..25: mol_type = other DNA
gcacacacatgtacacccccagaac

SEQ ID NO: 27591 - DNA, 25 bp, synthetic construct
  misc_feature 1..25: note = Oligonucleotide
  source 1..25: mol_type = other DNA
tgtgcacacacatgtacacccccag

SEQ ID NO: 27592 - DNA, 25 bp, synthetic construct
  misc_feature 1..25: note = Oligonucleotide
  source 1..25: mol_type = other DNA
ctgtgtgcacacacatgtacacccc

SEQ ID NO: 27593 - DNA, 25 bp, synthetic construct
  misc_feature 1..25: note = Oligonucleotide
  source 1..25: mol_type = other DNA
cacctgtgtgcacacacatgtacac

SEQ ID NO: 27594 - DNA, 25 bp, synthetic construct
  misc_feature 1..25: note = Oligonucleotide
  source 1..25: mol_type = other DNA
ggtcacctgtgtgcacacacatgta

SEQ ID NO: 27595 - DNA, 25 bp, synthetic construct
  misc_feature 1..25: note = Oligonucleotide
  source 1..25: mol_type = other DNA
cagggtcacctgtgtgcacacacat

SEQ ID NO: 27596 - DNA, 25 bp, synthetic construct
  misc_feature 1..25: note = Oligonucleotide
  source 1..25: mol_type = other DNA
gtacagggtcacctgtgtgcacaca

SEQ ID NO: 27597 - DNA, 25 bp, synthetic construct
  misc_feature 1..25: note = Oligonucleotide
  source 1..25: mol_type = other DNA
actgtacagggtcacctgtgtgcac

SEQ ID NO: 27598 - DNA, 25 bp, synthetic construct
  misc_feature 1..25: note = Oligonucleotide
  source 1..25: mol_type = other DNA
atcactgtacagggtcacctgtgtg

SEQ ID NO: 27599 - DNA, 25 bp, synthetic construct
  misc_feature 1..25: note = Oligonucleotide
  source 1..25: mol_type = other DNA
gcaatcactgtacagggtcacctgt

SEQ ID NO: 27600 - DNA, 25 bp, synthetic construct
  misc_feature 1..25: note = Oligonucleotide
  source 1..25: mol_type = other DNA
catgcaatcactgtacagggtcacc

SEQ ID NO: 27601 - DNA, 25 bp, synthetic construct
  misc_feature 1..25: note = Oligonucleotide
  source 1..25: mol_type = other DNA
acgcatgcaatcactgtacagggtc

SEQ ID NO: 27602 - DNA, 25 bp, synthetic construct
  misc_feature 1..25: note = Oligonucleotide
  source 1..25: mol_type = other DNA
tgcacgcatgcaatcactgtacagg

SEQ ID NO: 27603 - DNA, 25 bp, synthetic construct
  misc_feature 1..25: note = Oligonucleotide
  source 1..25: mol_type = other DNA
tggtgcacgcatgcaatcactgtac

SEQ ID NO: 27604 - DNA, 25 bp, synthetic construct
  misc_feature 1..25: note = Oligonucleotide
  source 1..25: mol_type = other DNA
ccctggtgcacgcatgcaatcactg

SEQ ID NO: 27605 - DNA, 25 bp, synthetic construct
  misc_feature 1..25: note = Oligonucleotide
  source 1..25: mol_type = other DNA
actccctggtgcacgcatgcaatca

SEQ ID NO: 27606 - DNA, 25 bp, synthetic construct
  misc_feature 1..25: note = Oligonucleotide
  source 1..25: mol_type = other DNA
cacactccctggtgcacgcatgcaa

SEQ ID NO: 27607 - DNA, 25 bp, synthetic construct
  misc_feature 1..25: note = Oligonucleotide
  source 1..25: mol_type = other DNA
ttccacactccctggtgcacgcatg

SEQ ID NO: 27608 - DNA, 25 bp, synthetic construct
  misc_feature 1..25: note = Oligonucleotide
  source 1..25: mol_type = other DNA
tatttccacactccctggtgcacgc

SEQ ID NO: 27609 - DNA, 25 bp, synthetic construct
  misc_feature 1..25: note = Oligonucleotide
  source 1..25: mol_type = other DNA
aagtatttccacactccctggtgca

SEQ ID NO: 27610 - DNA, 25 bp, synthetic construct
  misc_feature 1..25: note = Oligonucleotide
  source 1..25: mol_type = other DNA
ggcaagtatttccacactccctggt

SEQ ID NO: 27611 - DNA, 25 bp, synthetic construct
  misc_feature 1..25: note = Oligonucleotide
  source 1..25: mol_type = other DNA
acaggcaagtatttccacactccct

SEQ ID NO: 27612 - DNA, 25 bp, synthetic construct
  misc_feature 1..25: note = Oligonucleotide
  source 1..25: mol_type = other DNA
agaacaggcaagtatttccacactc

SEQ ID NO: 27613 - DNA, 25 bp, synthetic construct
  misc_feature 1..25: note = Oligonucleotide
  source 1..25: mol_type = other DNA
cccagaacaggcaagtatttccaca

SEQ ID NO: 27614 - DNA, 25 bp, synthetic construct
  misc_feature 1..25: note = Oligonucleotide
  source 1..25: mol_type = other DNA
acccccagaacaggcaagtatttcc

SEQ ID NO: 27615 - DNA, 25 bp, synthetic construct
  misc_feature 1..25: note = Oligonucleotide
  source 1..25: mol_type = other DNA
tacacccccagaacaggcaagtatt

SEQ ID NO: 27616 - DNA, 25 bp, synthetic construct
  misc_feature 1..25: note = Oligonucleotide
  source 1..25: mol_type = other DNA
gtgtacacccccagaacaggcaagt

SEQ ID NO: 27617 - DNA, 25 bp, synthetic construct
  misc_feature 1..25: note = Oligonucleotide
  source 1..25: mol_type = other DNA
cacgtgtacacccccagaacaggca

SEQ ID NO: 27618 - DNA, 25 bp, synthetic construct
  misc_feature 1..25: note = Oligonucleotide
  source 1..25: mol_type = other DNA
acacacgtgtacacccccagaacag

SEQ ID NO: 27619 - DNA, 25 bp, synthetic construct
  misc_feature 1..25: note = Oligonucleotide
  source 1..25: mol_type = other DNA
cacacacacgtgtacacccccagaa

SEQ ID NO: 27620 - DNA, 25 bp, synthetic construct
  misc_feature 1..25: note = Oligonucleotide
  source 1..25: mol_type = other DNA
gtgcacacacacgtgtacaccccca

SEQ ID NO: 27621 - DNA, 25 bp, synthetic construct
  misc_feature 1..25: note = Oligonucleotide
  source 1..25: mol_type = other DNA
tgtgtgcacacacacgtgtacaccc

SEQ ID NO: 27622 - DNA, 25 bp, synthetic construct
  misc_feature 1..25: note = Oligonucleotide
  source 1..25: mol_type = other DNA
atctgtgtgcacacacacgtgtaca

SEQ ID NO: 27623 - DNA, 25 bp, synthetic construct
  misc_feature 1..25: note = Oligonucleotide
  source 1..25: mol_type = other DNA
gtcatctgtgtgcacacacacgtgt

SEQ ID NO: 27624 - DNA, 25 bp, synthetic construct
  misc_feature 1..25: note = Oligonucleotide
  source 1..25: mol_type = other DNA
agggtcatctgtgtgcacacacacg

SEQ ID NO: 27625 - DNA, 25 bp, synthetic construct
  misc_feature 1..25: note = Oligonucleotide
  source 1..25: mol_type = other DNA
tacagggtcatctgtgtgcacacac

SEQ ID NO: 27626 - DNA, 25 bp, synthetic construct
  misc_feature 1..25: note = Oligonucleotide
  source 1..25: mol_type = other DNA
ctgtacagggtcatctgtgtgcaca

SEQ ID NO: 27627 - DNA, 25 bp, synthetic construct
  misc_feature 1..25: note = Oligonucleotide
  source 1..25: mol_type = other DNA
tcactgtacagggtcatctgtgtgc

SEQ ID NO: 27628 - DNA, 25 bp, synthetic construct
  misc_feature 1..25: note = Oligonucleotide
  source 1..25: mol_type = other DNA
caatcactgtacagggtcatctgtg

SEQ ID NO: 27629 - DNA, 25 bp, synthetic construct
  misc_feature 1..25: note = Oligonucleotide
  source 1..25: mol_type = other DNA
acacaatcactgtacagggtcatct

SEQ ID NO: 27630 - DNA, 25 bp, synthetic construct
  misc_feature 1..25: note = Oligonucleotide
  source 1..25: mol_type = other DNA
catacacaatcactgtacagggtca

SEQ ID NO: 27631 - DNA, 25 bp, synthetic construct
  misc_feature 1..25: note = Oligonucleotide
  source 1..25: mol_type = other DNA
gcacatacacaatcactgtacaggg

SEQ ID NO: 27632 - DNA, 25 bp, synthetic construct
  misc_feature 1..25: note = Oligonucleotide
  source 1..25: mol_type = other DNA
gatgcacatacacaatcactgtaca

SEQ ID NO: 27633 - DNA, 25 bp, synthetic construct
  misc_feature 1..25: note = Oligonucleotide
  source 1..25: mol_type = other DNA
agggatgcacatacacaatcactgt

SEQ ID NO: 27634 - DNA, 25 bp, synthetic construct
  misc_feature 1..25: note = Oligonucleotide
  source 1..25: mol_type = other DNA
ggcagggatgcacatacacaatcac

SEQ ID NO: 27635 - DNA, 25 bp, synthetic construct
  misc_feature 1..25: note = Oligonucleotide
  source 1..25: mol_type = other DNA
agaggcagggatgcacatacacaat

SEQ ID NO: 27636 - DNA, 25 bp, synthetic construct
  misc_feature 1..25: note = Oligonucleotide
  source 1..25: mol_type = other DNA
cacagaggcagggatgcacatacac

SEQ ID NO: 27637 - DNA, 25 bp, synthetic construct
  misc_feature 1..25: note = Oligonucleotide
  source 1..25: mol_type = other DNA
tggcacagaggcagggatgcacata

SEQ ID NO: 27638 - DNA, 25 bp, synthetic construct
  misc_feature 1..25: note = Oligonucleotide
  source 1..25: mol_type = other DNA
ccatggcacagaggcagggatgcac

SEQ ID NO: 27639 - DNA, 25 bp, synthetic construct
  misc_feature 1..25: note = Oligonucleotide
  source 1..25: mol_type = other DNA
ataccatggcacagaggcagggatg

SEQ ID NO: 27640 - DNA, 25 bp, synthetic construct
  misc_feature 1..25: note = Oligonucleotide
  source 1..25: mol_type = other DNA
tatataccatggcacagaggcaggg

SEQ ID NO: 27641 - DNA, 25 bp, synthetic construct
  misc_feature 1..25: note = Oligonucleotide
  source 1..25: mol_type = other DNA
atatatataccatggcacagaggca

SEQ ID NO: 27642 - DNA, 25 bp, synthetic construct
  misc_feature 1..25: note = Oligonucleotide
  source 1..25: mol_type = other DNA
cacatatatataccatggcacagag

SEQ ID NO: 27643 - DNA, 25 bp, synthetic construct
  misc_feature 1..25: note = Oligonucleotide
  source 1..25: mol_type = other DNA
gagcacatatatataccatggcaca

SEQ ID NO: 27644 - DNA, 25 bp, synthetic construct
  misc_feature 1..25: note = Oligonucleotide
  source 1..25: mol_type = other DNA
acagagcacatatatataccatggc

SEQ ID NO: 27645 - DNA, 25 bp, synthetic construct
  misc_feature 1..25: note = Oligonucleotide
  source 1..25: mol_type = other DNA
gacacagagcacatatatataccat

SEQ ID NO: 27646 - DNA, 25 bp, synthetic construct
  misc_feature 1..25: note = Oligonucleotide
  source 1..25: mol_type = other DNA
caggacacagagcacatatatatac

SEQ ID NO: 27647 - DNA, 25 bp, synthetic construct
  misc_feature 1..25: note = Oligonucleotide
  source 1..25: mol_type = other DNA
ctgcaggacacagagcacatatata

SEQ ID NO: 27648 - DNA, 25 bp, synthetic construct
  misc_feature 1..25: note = Oligonucleotide
  source 1..25: mol_type = other DNA
tcactgcaggacacagagcacatat

SEQ ID NO: 27649 - DNA, 25 bp, synthetic construct
  misc_feature 1..25: note = Oligonucleotide
  source 1..25: mol_type = other DNA
aactcactgcaggacacagagcaca

SEQ ID NO: 27650 - DNA, 25 bp, synthetic construct
  misc_feature 1..25: note = Oligonucleotide
  source 1..25: mol_type = other DNA
cacaactcactgcaggacacagagc

SEQ ID NO: 27651 - DNA, 25 bp, synthetic construct
  misc_feature 1..25: note = Oligonucleotide
  source 1..25: mol_type = other DNA
agccacaactcactgcaggacacag

SEQ ID NO: 27652 - DNA, 25 bp, synthetic construct
  misc_feature 1..25: note = Oligonucleotide
  source 1..25: mol_type = other DNA
tgcagccacaactcactgcaggaca

SEQ ID NO: 27653 - DNA, 25 bp, synthetic construct
  misc_feature 1..25: note = Oligonucleotide
  source 1..25: mol_type = other DNA
tgctgcagccacaactcactgcagg

SEQ ID NO: 27654 - DNA, 25 bp, synthetic construct
  misc_feature 1..25: note = Oligonucleotide
  source 1..25: mol_type = other DNA
ctgtgctgcagccacaactcactgc

SEQ ID NO: 27655 - DNA, 25 bp, synthetic construct
  misc_feature 1..25: note = Oligonucleotide
  source 1..25: mol_type = other DNA
aggctgtgctgcagccacaactcac

SEQ ID NO: 27656 - DNA, 25 bp, synthetic construct
  misc_feature 1..25: note = Oligonucleotide
  source 1..25: mol_type = other DNA
atgaggctgtgctgcagccacaact

SEQ ID NO: 27657 - DNA, 25 bp, synthetic construct
  misc_feature 1..25: note = Oligonucleotide
  source 1..25: mol_type = other DNA
cctatgaggctgtgctgcagccaca

SEQ ID NO: 27658 - DNA, 25 bp, synthetic construct
  misc_feature 1..25: note = Oligonucleotide
  source 1..25: mol_type = other DNA
atgcctatgaggctgtgctgcagcc

SEQ ID NO: 27659 - DNA, 25 bp, synthetic construct
  misc_feature 1..25: note = Oligonucleotide
  source 1..25: mol_type = other DNA
catatgcctatgaggctgtgctgca

SEQ ID NO: 27660 - DNA, 25 bp, synthetic construct
  misc_feature 1..25: note = Oligonucleotide
  source 1..25: mol_type = other DNA
acacatatgcctatgaggctgtgct

SEQ ID NO: 27661 - DNA, 25 bp, synthetic construct
  misc_feature 1..25: note = Oligonucleotide
  source 1..25: mol_type = other DNA
tgcacacatatgcctatgaggctgt

SEQ ID NO: 27662 - DNA, 25 bp, synthetic construct
  misc_feature 1..25: note = Oligonucleotide
  source 1..25: mol_type = other DNA
atgtgcacacatatgcctatgaggc

SEQ ID NO: 27663 - DNA, 25 bp, synthetic construct
  misc_feature 1..25: note = Oligonucleotide
  source 1..25: mol_type = other DNA
caaatgtgcacacatatgcctatga

SEQ ID NO: 27664 - DNA, 25 bp, synthetic construct
  misc_feature 1..25: note = Oligonucleotide
  source 1..25: mol_type = other DNA
gaacaaatgtgcacacatatgccta

SEQ ID NO: 27665 - DNA, 25 bp, synthetic construct
  misc_feature 1..25: note = Oligonucleotide
  source 1..25: mol_type = other DNA
agagaacaaatgtgcacacatatgc

SEQ ID NO: 27666 - DNA, 25 bp, synthetic construct
  misc_feature 1..25: note = Oligonucleotide
  source 1..25: mol_type = other DNA
ttcagagaacaaatgtgcacacata

SEQ ID NO: 27667 - DNA, 25 bp, synthetic construct
  misc_feature 1..25: note = Oligonucleotide
  source 1..25: mol_type = other DNA
gtgttcagagaacaaatgtgcacac

SEQ ID NO: 27668 - DNA, 25 bp, synthetic construct
  misc_feature 1..25: note = Oligonucleotide
  source 1..25: mol_type = other DNA
tgtgtgttcagagaacaaatgtgca

SEQ ID NO: 27669 - DNA, 25 bp, synthetic construct
  misc_feature 1..25: note = Oligonucleotide
  source 1..25: mol_type = other DNA
ccctgtgtgttcagagaacaaatgt

SEQ ID NO: 27670 - DNA, 25 bp, synthetic construct
  misc_feature 1..25: note = Oligonucleotide
  source 1..25: mol_type = other DNA
agcccctgtgtgttcagagaacaaa

SEQ ID NO: 27671 - DNA, 25 bp, synthetic construct
  misc_feature 1..25: note = Oligonucleotide
  source 1..25: mol_type = other DNA
tgaagcccctgtgtgttcagagaac

SEQ ID NO: 27672 - DNA, 25 bp, synthetic construct
  misc_feature 1..25: note = Oligonucleotide
  source 1..25: mol_type = other DNA
atgtgaagcccctgtgtgttcagag

SEQ ID NO: 27673 - DNA, 25 bp, synthetic construct
  misc_feature 1..25: note = Oligonucleotide
  source 1..25: mol_type = other DNA
cacatgtgaagcccctgtgtgttca

SEQ ID NO: 27674 - DNA, 25 bp, synthetic construct
  misc_feature 1..25: note = Oligonucleotide
  source 1..25: mol_type = other DNA
gcacacatgtgaagcccctgtgtgt

SEQ ID NO: 27675 - DNA, 25 bp, synthetic construct
  misc_feature 1..25: note = Oligonucleotide
  source 1..25: mol_type = other DNA
cgtgcacacatgtgaagcccctgtg

SEQ ID NO: 27676 - DNA, 25 bp, synthetic construct
  misc_feature 1..25: note = Oligonucleotide
  source 1..25: mol_type = other DNA
acacgtgcacacatgtgaagcccct

SEQ ID NO: 27677 - DNA, 25 bp, synthetic construct
  misc_feature 1..25: note = Oligonucleotide
  source 1..25: mol_type = other DNA
aacacacgtgcacacatgtgaagcc

SEQ ID NO: 27678 - DNA, 25 bp, synthetic construct
  misc_feature 1..25: note = Oligonucleotide
  source 1..25: mol_type = other DNA
cagaacacacgtgcacacatgtgaa

SEQ ID NO: 27679 - DNA, 25 bp, synthetic construct
  misc_feature 1..25: note = Oligonucleotide
  source 1..25: mol_type = other DNA
attcagaacacacgtgcacacatgt

SEQ ID NO: 27680 - DNA, 25 bp, synthetic construct
  misc_feature 1..25: note = Oligonucleotide
  source 1..25: mol_type = other DNA
gttattcagaacacacgtgcacaca

SEQ ID NO: 27681 - DNA, 25 bp, synthetic construct
  misc_feature 1..25: note = Oligonucleotide
  source 1..25: mol_type = other DNA
ctggttattcagaacacacgtgcac

SEQ ID NO: 27682 - DNA, 25 bp, synthetic construct
  misc_feature 1..25: note = Oligonucleotide
  source 1..25: mol_type = other DNA
tacctggttattcagaacacacgtg

SEQ ID NO: 27683 - DNA, 25 bp, synthetic construct
  misc_feature 1..25: note = Oligonucleotide
  source 1..25: mol_type = other DNA
tcatacctggttattcagaacacac

SEQ ID NO: 27684 - DNA, 25 bp, synthetic construct
  misc_feature 1..25: note = Oligonucleotide
  source 1..25: mol_type = other DNA
aattcatacctggttattcagaaca

SEQ ID NO: 27685 - DNA, 25 bp, synthetic construct
  misc_feature 1..25: note = Oligonucleotide
  source 1..25: mol_type = other DNA
cccaattcatacctggttattcaga

SEQ ID NO: 27686 - DNA, 25 bp, synthetic construct
  misc_feature 1..25: note = Oligonucleotide
  source 1..25: mol_type = other DNA
gtacccaattcatacctggttattc

SEQ ID NO: 27687 - DNA, 25 bp, synthetic construct
  misc_feature 1..25: note = Oligonucleotide
  source 1..25: mol_type = other DNA
gatgtacccaattcatacctggtta

SEQ ID NO: 27688 - DNA, 25 bp, synthetic construct
  misc_feature 1..25: note = Oligonucleotide
  source 1..25: mol_type = other DNA
ctagatgtacccaattcatacctgg

SEQ ID NO: 27689 - DNA, 25 bp, synthetic construct
  misc_feature 1..25: note = Oligonucleotide
  source 1..25: mol_type = other DNA
ggcctagatgtacccaattcatacc

SEQ ID NO: 27690 - DNA, 25 bp, synthetic construct
  misc_feature 1..25: note = Oligonucleotide
  source 1..25: mol_type = other DNA
gagggcctagatgtacccaattcat

SEQ ID NO: 27691 - DNA, 25 bp, synthetic construct
  misc_feature 1..25: note = Oligonucleotide
  source 1..25: mol_type = other DNA
ccagagggcctagatgtacccaatt

SEQ ID NO: 27692 - DNA, 25 bp, synthetic construct
  misc_feature 1..25: note = Oligonucleotide
  source 1..25: mol_type = other DNA
ggcccagagggcctagatgtaccca

SEQ ID NO: 27693 - DNA, 25 bp, synthetic construct
  misc_feature 1..25: note = Oligonucleotide
  source 1..25: mol_type = other DNA
cctggcccagagggcctagatgtac

SEQ ID NO: 27694 - DNA, 25 bp, synthetic construct
  misc_feature 1..25: note = Oligonucleotide
  source 1..25: mol_type = other DNA
tcacctggcccagagggcctagatg

SEQ ID NO: 27695 - DNA, 25 bp, synthetic construct
  misc_feature 1..25: note = Oligonucleotide
  source 1..25: mol_type = other DNA
gtctcacctggcccagagggcctag

SEQ ID NO: 27696 - DNA, 25 bp, synthetic construct
  misc_feature 1..25: note = Oligonucleotide
  source 1..25: mol_type = other DNA
caggtctcacctggcccagagggcc

SEQ ID NO: 27697 - DNA, 25 bp, synthetic construct
  misc_feature 1..25: note = Oligonucleotide
  source 1..25: mol_type = other DNA
gctcaggtctcacctggcccagagg

SEQ ID NO: 27698 - DNA, 25 bp, synthetic construct
  misc_feature 1..25: note = Oligonucleotide
  source 1..25: mol_type = other DNA
cacgctcaggtctcacctggcccag

SEQ ID NO: 27699 - DNA, 25 bp, synthetic construct
  misc_feature 1..25: note = Oligonucleotide
  source 1..25: mol_type = other DNA
atacacgctcaggtctcacctggcc

SEQ ID NO: 27700 - DNA, 25 bp, synthetic construct
  misc_feature 1..25: note = Oligonucleotide
  source 1..25: mol_type = other DNA
ggtatacacgctcaggtctcacctg

SEQ ID NO: 27701 - DNA, 25 bp, synthetic construct
  misc_feature 1..25: note = Oligonucleotide
  source 1..25: mol_type = other DNA
gtaggtatacacgctcaggtctcac

SEQ ID NO: 27702 - DNA, 25 bp, synthetic construct
  misc_feature 1..25: note = Oligonucleotide
  source 1..25: mol_type = other DNA
ccagtaggtatacacgctcaggtct

SEQ ID NO: 27703 - DNA, 25 bp, synthetic construct
  misc_feature 1..25: note = Oligonucleotide
  source 1..25: mol_type = other DNA
aagccagtaggtatacacgctcagg

SEQ ID NO: 27704 - DNA, 25 bp, synthetic construct
  misc_feature 1..25: note = Oligonucleotide
  source 1..25: mol_type = other DNA
gacaagccagtaggtatacacgctc

SEQ ID NO: 27705 - DNA, 25 bp, synthetic construct
  misc_feature 1..25: note = Oligonucleotide
  source 1..25: mol_type = other DNA
agagacaagccagtaggtatacacg

SEQ ID NO: 27706 - DNA, 25 bp, synthetic construct
  misc_feature 1..25: note = Oligonucleotide
  source 1..25: mol_type = other DNA
tgcagagacaagccagtaggtatac

SEQ ID NO: 27707 - DNA, 25 bp, synthetic construct
  misc_feature 1..25: note = Oligonucleotide
  source 1..25: mol_type = other DNA
agttgcagagacaagccagtaggta

SEQ ID NO: 27708 - DNA, 25 bp, synthetic construct
  misc_feature 1..25: note = Oligonucleotide
  source 1..25: mol_type = other DNA
ctgagttgcagagacaagccagtag

SEQ ID NO: 27709 - DNA, 25 bp, synthetic construct
  misc_feature 1..25: note = Oligonucleotide
  source 1..25: mol_type = other DNA
cacctgagttgcagagacaagccag

SEQ ID NO: 27710 - DNA, 25 bp, synthetic construct
  misc_feature 1..25: note = Oligonucleotide
  source 1..25: mol_type = other DNA
gtacacctgagttgcagagacaagc

SEQ ID NO: 27711 - DNA, 25 bp, synthetic construct
  misc_feature 1..25: note = Oligonucleotide
  source 1..25: mol_type = other DNA
catgtacacctgagttgcagagaca

SEQ ID NO: 27712 - DNA, 25 bp, synthetic construct
  misc_feature 1..25: note = Oligonucleotide
  source 1..25: mol_type = other DNA
ttccatgtacacctgagttgcagag

SEQ ID NO: 27713 - DNA, 25 bp, synthetic construct
  misc_feature 1..25: note = Oligonucleotide
  source 1..25: mol_type = other DNA
ttgttccatgtacacctgagttgca

SEQ ID NO: 27714 - DNA, 25 bp, synthetic construct
  misc_feature 1..25: note = Oligonucleotide
  source 1..25: mol_type = other DNA
tatttgttccatgtacacctgagtt

SEQ ID NO: 27715 - DNA, 25 bp, synthetic construct
  misc_feature 1..25: note = Oligonucleotide
  source 1..25: mol_type = other DNA
acctatttgttccatgtacacctga

SEQ ID NO: 27716 - DNA, 25 bp, synthetic construct
  misc_feature 1..25: note = Oligonucleotide
  source 1..25: mol_type = other DNA
cacacctatttgttccatgtacacc

SEQ ID NO: 27717 - DNA, 25 bp, synthetic construct
  misc_feature 1..25: note = Oligonucleotide
  source 1..25: mol_type = other DNA
actcacacctatttgttccatgtac

SEQ ID NO: 27718 - DNA, 25 bp, synthetic construct
  misc_feature 1..25: note = Oligonucleotide
  source 1..25: mol_type = other DNA
cggactcacacctatttgttccatg

SEQ ID NO: 27719 - DNA, 25 bp, synthetic construct
  misc_feature 1..25: note = Oligonucleotide
  source 1..25: mol_type = other DNA
acacggactcacacctatttgttcc

SEQ ID NO: 27720 - DNA, 25 bp, synthetic construct
  misc_feature 1..25: note = Oligonucleotide
  source 1..25: mol_type = other DNA
cacacacggactcacacctatttgt

SEQ ID NO: 27721 - DNA, 25 bp, synthetic construct
  misc_feature 1..25: note = Oligonucleotide
  source 1..25: mol_type = other DNA
tcacacacacggactcacacctatt

SEQ ID NO: 27722 - DNA, 25 bp, synthetic construct
  misc_feature 1..25: note = Oligonucleotide
  source 1..25: mol_type = other DNA
ggctcacacacacggactcacacct

SEQ ID NO: 27723 - DNA, 25 bp, synthetic construct
  misc_feature 1..25: note = Oligonucleotide
  source 1..25: mol_type = other DNA
acaggctcacacacacggactcaca

SEQ ID NO: 27724 - DNA, 25 bp, synthetic construct
  misc_feature 1..25: note = Oligonucleotide
  source 1..25: mol_type = other DNA
ggcacaggctcacacacacggactc

SEQ ID NO: 27725 - DNA, 25 bp, synthetic construct
  misc_feature 1..25: note = Oligonucleotide
  source 1..25: mol_type = other DNA
cagggcacaggctcacacacacgga

SEQ ID NO: 27726 - DNA, 25 bp, synthetic construct
  misc_feature 1..25: note = Oligonucleotide
  source 1..25: mol_type = other DNA
gcgcagggcacaggctcacacacac

SEQ ID NO: 27727 - DNA, 25 bp, synthetic construct
  misc_feature 1..25: note = Oligonucleotide
  source 1..25: mol_type = other DNA
cgtgcgcagggcacaggctcacaca

SEQ ID NO: 27728 - DNA, 25 bp, synthetic construct
  misc_feature 1..25: note = Oligonucleotide
  source 1..25: mol_type = other DNA
tggcgtgcgcagggcacaggctcac

SEQ ID NO: 27729 - DNA, 25 bp, synthetic construct
  misc_feature 1..25: note = Oligonucleotide
  source 1..25: mol_type = other DNA
acatggcgtgcgcagggcacaggct

SEQ ID NO: 27730 - DNA, 25 bp, synthetic construct
  misc_feature 1..25: note = Oligonucleotide
  source 1..25: mol_type = other DNA
cacacatggcgtgcgcagggcacag

SEQ ID NO: 27731 - DNA, 25 bp, synthetic construct
  misc_feature 1..25: note = Oligonucleotide
  source 1..25: mol_type = other DNA
atgcacacatggcgtgcgcagggca

SEQ ID NO: 27732 - DNA, 25 bp, synthetic construct
  misc_feature 1..25: note = Oligonucleotide
  source 1..25: mol_type = other DNA
ggaatgcacacatggcgtgcgcagg

SEQ ID NO: 27733 - DNA, 25 bp, synthetic construct
  misc_feature 1..25: note = Oligonucleotide
  source 1..25: mol_type = other DNA
acaggaatgcacacatggcgtgcgc

SEQ ID NO: 27734 - DNA, 25 bp, synthetic construct
  misc_feature 1..25: note = Oligonucleotide
  source 1..25: mol_type = other DNA
cacacaggaatgcacacatggcgtg

SEQ ID NO: 27735 - DNA, 25 bp, synthetic construct
  misc_feature 1..25: note = Oligonucleotide
  source 1..25: mol_type = other DNA
gcgcacacaggaatgcacacatggc

SEQ ID NO: 27736 - DNA, 25 bp, synthetic construct
  misc_feature 1..25: note = Oligonucleotide
  source 1..25: mol_type = other DNA
catgcgcacacaggaatgcacacat

SEQ ID NO: 27737 - DNA, 25 bp, synthetic construct
  misc_feature 1..25: note = Oligonucleotide
  source 1..25: mol_type = other DNA
gcacatgcgcacacaggaatgcaca

SEQ ID NO: 27738 - DNA, 25 bp, synthetic construct
  misc_feature 1..25: note = Oligonucleotide
  source 1..25: mol_type = other DNA
acagcacatgcgcacacaggaatgc

SEQ ID NO: 27739 - DNA, 25 bp, synthetic construct
  misc_feature 1..25: note = Oligonucleotide
  source 1..25: mol_type = other DNA
acaacagcacatgcgcacacaggaa

SEQ ID NO: 27740 - DNA, 25 bp, synthetic construct
  misc_feature 1..25: note = Oligonucleotide
  source 1..25: mol_type = other DNA
agcacaacagcacatgcgcacacag

SEQ ID NO: 27741 - DNA, 25 bp, synthetic construct
  misc_feature 1..25: note = Oligonucleotide
  source 1..25: mol_type = other DNA
ccgagcacaacagcacatgcgcaca

SEQ ID NO: 27742 - DNA, 25 bp, synthetic construct
  misc_feature 1..25: note = Oligonucleotide
  source 1..25: mol_type = other DNA
catccgagcacaacagcacatgcgc

SEQ ID NO: 27743 - DNA, 25 bp, synthetic construct
  misc_feature 1..25: note = Oligonucleotide
  source 1..25: mol_type = other DNA
gaccatccgagcacaacagcacatg

SEQ ID NO: 27744 - DNA, 25 bp, synthetic construct
  misc_feature 1..25: note = Oligonucleotide
  source 1..25: mol_type = other DNA
agagaccatccgagcacaacagcac

SEQ ID NO: 27745 - DNA, 25 bp, synthetic construct
  misc_feature 1..25: note = Oligonucleotide
  source 1..25: mol_type = other DNA
tggagagaccatccgagcacaacag

SEQ ID NO: 27746 - DNA, 25 bp, synthetic construct
  misc_feature 1..25: note = Oligonucleotide
  source 1..25: mol_type = other DNA
ggctggagagaccatccgagcacaa

SEQ ID NO: 27747 - DNA, 25 bp, synthetic construct
  misc_feature 1..25: note = Oligonucleotide
  source 1..25: mol_type = other DNA
ggtggctggagagaccatccgagca

SEQ ID NO: 27748 - DNA, 25 bp, synthetic construct
  misc_feature 1..25: note = Oligonucleotide
  source 1..25: mol_type = other DNA
ctgggtggctggagagaccatccga

SEQ ID NO: 27749 - DNA, 25 bp, synthetic construct
  misc_feature 1..25: note = Oligonucleotide
  source 1..25: mol_type = other DNA
cagctgggtggctggagagaccatc

SEQ ID NO: 27750 - DNA, 25 bp, synthetic construct
  misc_feature 1..25: note = Oligonucleotide
  source 1..25: mol_type = other DNA
tcacagctgggtggctggagagacc

SEQ ID NO: 27751 - DNA, 25 bp, synthetic construct
  misc_feature 1..25: note = Oligonucleotide
  source 1..25: mol_type = other DNA
gaatcacagctgggtggctggagag

SEQ ID NO: 27752 - DNA, 25 bp, synthetic construct
  misc_feature 1..25: note = Oligonucleotide
  source 1..25: mol_type = other DNA
agggaatcacagctgggtggctgga

SEQ ID NO: 27753 - DNA, 25 bp, synthetic construct
  misc_feature 1..25: note = Oligonucleotide
  source 1..25: mol_type = other DNA
aagagggaatcacagctgggtggct

SEQ ID NO: 27754 - DNA, 25 bp, synthetic construct
  misc_feature 1..25: note = Oligonucleotide
  source 1..25: mol_type = other DNA
gggaagagggaatcacagctgggtg

SEQ ID NO: 27755 - DNA, 25 bp, synthetic construct
  misc_feature 1..25: note = Oligonucleotide
  source 1..25: mol_type = other DNA
gcggggaagagggaatcacagctgg

SEQ ID NO: 27756 - DNA, 25 bp, synthetic construct
  misc_feature 1..25: note = Oligonucleotide
  source 1..25: mol_type = other DNA
gttgcggggaagagggaatcacagc

SEQ ID NO: 27757 - DNA, 25 bp, synthetic construct
  misc_feature 1..25: note = Oligonucleotide
  source 1..25: mol_type = other DNA
cctgttgcggggaagagggaatcac

SEQ ID NO: 27758 - DNA, 25 bp, synthetic construct
  misc_feature 1..25: note = Oligonucleotide
  source 1..25: mol_type = other DNA
tctcctgttgcggggaagagggaat

SEQ ID NO: 27759 - DNA, 25 bp, synthetic construct
  misc_feature 1..25: note = Oligonucleotide
  source 1..25: mol_type = other DNA
agctctcctgttgcggggaagaggg

SEQ ID NO: 27760 - DNA, 25 bp, synthetic construct
  misc_feature 1..25: note = Oligonucleotide
  source 1..25: mol_type = other DNA
cacagctctcctgttgcggggaaga

SEQ ID NO: 27761 - DNA, 25 bp, synthetic construct
  misc_feature 1..25: note = Oligonucleotide
  source 1..25: mol_type = other DNA
gagcacagctctcctgttgcgggga

SEQ ID NO: 27762 - DNA, 25 bp, synthetic construct
  misc_feature 1..25: note = Oligonucleotide
  source 1..25: mol_type = other DNA
cacgagcacagctctcctgttgcgg

SEQ ID NO: 27763 - DNA, 25 bp, synthetic construct
  misc_feature 1..25: note = Oligonucleotide
  source 1..25: mol_type = other DNA
ggacacgagcacagctctcctgttg

SEQ ID NO: 27764 - DNA, 25 bp, synthetic construct
  misc_feature 1..25: note = Oligonucleotide
  source 1..25: mol_type = other DNA
gcaggacacgagcacagctctcctg

SEQ ID NO: 27765 - DNA, 25 bp, synthetic construct
  misc_feature 1..25: note = Oligonucleotide
  source 1..25: mol_type = other DNA
agagcaggacacgagcacagctctc

SEQ ID NO: 27766 - DNA, 25 bp, synthetic construct
  misc_feature 1..25: note = Oligonucleotide
  source 1..25: mol_type = other DNA
ggaagagcaggacacgagcacagct

SEQ ID NO: 27767 - DNA, 25 bp, synthetic construct
  misc_feature 1..25: note = Oligonucleotide
  source 1..25: mol_type = other DNA
cacggaagagcaggacacgagcaca

SEQ ID NO: 27768 - DNA, 25 bp, synthetic construct
  misc_feature 1..25: note = Oligonucleotide
  source 1..25: mol_type = other DNA
ctccacggaagagcaggacacgagc

SEQ ID NO: 27769 - DNA, 25 bp, synthetic construct
  misc_feature 1..25: note = Oligonucleotide
  source 1..25: mol_type = other DNA
tagctccacggaagagcaggacacg

SEQ ID NO: 27770 - DNA, 25 bp, synthetic construct
  misc_feature 1..25: note = Oligonucleotide
  source 1..25: mol_type = other DNA
tgttagctccacggaagagcaggac

SEQ ID NO: 27771 - DNA, 25 bp, synthetic construct
  misc_feature 1..25: note = Oligonucleotide
  source 1..25: mol_type = other DNA
ccctgttagctccacggaagagcag

SEQ ID NO: 27772 - DNA, 25 bp, synthetic construct
  misc_feature 1..25: note = Oligonucleotide
  source 1..25: mol_type = other DNA
catccctgttagctccacggaagag

SEQ ID NO: 27773 - DNA, 25 bp, synthetic construct
  misc_feature 1..25: note = Oligonucleotide
  source 1..25: mol_type = other DNA
ggacatccctgttagctccacggaa

SEQ ID NO: 27774 - DNA, 25 bp, synthetic construct
  misc_feature 1..25: note = Oligonucleotide
  source 1..25: mol_type = other DNA
tgcggacatccctgttagctccacg

SEQ ID NO: 27775 - DNA, 25 bp, synthetic construct
  misc_feature 1..25: note = Oligonucleotide
  source 1..25: mol_type = other DNA
agttgcggacatccctgttagctcc

SEQ ID NO: 27776 - DNA, 25 bp, synthetic construct
  misc_feature 1..25: note = Oligonucleotide
  source 1..25: mol_type = other DNA
tgtagttgcggacatccctgttagc

SEQ ID NO: 27777 - DNA, 25 bp, synthetic construct
  misc_feature 1..25: note = Oligonucleotide
  source 1..25: mol_type = other DNA
tgttgtagttgcggacatccctgtt

SEQ ID NO: 27778 - DNA, 25 bp, synthetic construct
  misc_feature 1..25: note = Oligonucleotide
  source 1..25: mol_type = other DNA
ggctgttgtagttgcggacatccct

SEQ ID NO: 27779 - DNA, 25 bp, synthetic construct
  misc_feature 1..25: note = Oligonucleotide
  source 1..25: mol_type = other DNA
tctggctgttgtagttgcggacatc

SEQ ID NO: 27780 - DNA, 25 bp, synthetic construct
  misc_feature 1..25: note = Oligonucleotide
  source 1..25: mol_type = other DNA
ctgtctggctgttgtagttgcggac

SEQ ID NO: 27781 - DNA, 25 bp, synthetic construct
  misc_feature 1..25: note = Oligonucleotide
  source 1..25: mol_type = other DNA
aggctgtctggctgttgtagttgcg

SEQ ID NO: 27782 - DNA, 25 bp, synthetic construct
  misc_feature 1..25: note = Oligonucleotide
  source 1..25: mol_type = other DNA
ggaaggctgtctggctgttgtagtt

SEQ ID NO: 27783 - DNA, 25 bp, synthetic construct
  misc_feature 1..25: note = Oligonucleotide
  source 1..25: mol_type = other DNA
cctggaaggctgtctggctgttgta

SEQ ID NO: 27784 - DNA, 25 bp, synthetic construct
  misc_feature 1..25: note = Oligonucleotide
  source 1..25: mol_type = other DNA
gtacctggaaggctgtctggctgtt

SEQ ID NO: 27785 - DNA, 25 bp, synthetic construct
  misc_feature 1..25: note = Oligonucleotide
  source 1..25: mol_type = other DNA
ggtgtacctggaaggctgtctggct

SEQ ID NO: 27786 - DNA, 25 bp, synthetic construct
  misc_feature 1..25: note = Oligonucleotide
  source 1..25: mol_type = other DNA
accggtgtacctggaaggctgtctg

SEQ ID NO: 27787 - DNA, 25 bp, synthetic construct
  misc_feature 1..25: note = Oligonucleotide
  source 1..25: mol_type = other DNA
accaccggtgtacctggaaggctgt

SEQ ID NO: 27788 - DNA, 25 bp, synthetic construct
  misc_feature 1..25: note = Oligonucleotide
  source 1..25: mol_type = other DNA
taaaccaccggtgtacctggaaggc

SEQ ID NO: 27789 - DNA, 25 bp, synthetic construct
  misc_feature 1..25: note = Oligonucleotide
  source 1..25: mol_type = other DNA
ctgtaaaccaccggtgtacctggaa

SEQ ID NO: 27790 - DNA, 25 bp, synthetic construct
  misc_feature 1..25: note = Oligonucleotide
  source 1..25: mol_type = other DNA
ctcctgtaaaccaccggtgtacctg

SEQ ID NO: 27791 - DNA, 25 bp, synthetic construct
  misc_feature 1..25: note = Oligonucleotide
  source 1..25: mol_type = other DNA
cctgagggaaaggggaggtcaaggc

SEQ ID NO: 27792 - DNA, 25 bp, synthetic construct
  misc_feature 1..25: note = Oligonucleotide
  source 1..25: mol_type = other DNA
ccacctgagggaaaggggaggtcaa

SEQ ID NO: 27793 - DNA, 25 bp, synthetic construct
  misc_feature 1..25: note = Oligonucleotide
  source 1..25: mol_type = other DNA
tggccacctgagggaaaggggaggt

SEQ ID NO: 27794 - DNA, 25 bp, synthetic construct
  misc_feature 1..25: note = Oligonucleotide
  source 1..25: mol_type = other DNA
tgatggccacctgagggaaagggga

SEQ ID NO: 27795 - DNA, 25 bp, synthetic construct
  misc_feature 1..25: note = Oligonucleotide
  source 1..25: mol_type = other DNA
cgatgatggccacctgagggaaagg

SEQ ID NO: 27796 - DNA, 25 bp, synthetic construct
  misc_feature 1..25: note = Oligonucleotide
  source 1..25: mol_type = other DNA
ctgcgatgatggccacctgagggaa

SEQ ID NO: 27797 - DNA, 25 bp, synthetic construct
  misc_feature 1..25: note = Oligonucleotide
  source 1..25: mol_type = other DNA
tccctgcgatgatggccacctgagg

SEQ ID NO: 27798 - DNA, 25 bp, synthetic construct
  misc_feature 1..25: note = Oligonucleotide
  source 1..25: mol_type = other DNA
agttccctgcgatgatggccacctg

SEQ ID NO: 27799 - DNA, 25 bp, synthetic construct
  misc_feature 1..25: note = Oligonucleotide
  source 1..25: mol_type = other DNA
caaagttccctgcgatgatggccac

SEQ ID NO: 27800 - DNA, 25 bp, synthetic construct
  misc_feature 1..25: note = Oligonucleotide
  source 1..25: mol_type = other DNA
gctcaaagttccctgcgatgatggc

SEQ ID NO: 27801 - DNA, 25 bp, synthetic construct
  misc_feature 1..25: note = Oligonucleotide
  source 1..25: mol_type = other DNA
caagctcaaagttccctgcgatgat

SEQ ID NO: 27802 - DNA, 25 bp, synthetic construct
  misc_feature 1..25: note = Oligonucleotide
  source 1..25: mol_type = other DNA
ctgcaagctcaaagttccctgcgat

SEQ ID NO: 27803 - DNA, 25 bp, synthetic construct
  misc_feature 1..25: note = Oligonucleotide
  source 1..25: mol_type = other DNA
cctctgcaagctcaaagttccctgc

SEQ ID NO: 27804 - DNA, 25 bp, synthetic construct
  misc_feature 1..25: note = Oligonucleotide
  source 1..25: mol_type = other DNA
taacctctgcaagctcaaagttccc

SEQ ID NO: 27805 - DNA, 25 bp, synthetic construct
  misc_feature 1..25: note = Oligonucleotide
  source 1..25: mol_type = other DNA
tgataacctctgcaagctcaaagtt

SEQ ID NO: 27806 - DNA, 25 bp, synthetic construct
  misc_feature 1..25: note = Oligonucleotide
  source 1..25: mol_type = other DNA
tcttgataacctctgcaagctcaaa

SEQ ID NO: 27807 - DNA, 25 bp, synthetic construct
  misc_feature 1..25: note = Oligonucleotide
  source 1..25: mol_type = other DNA
gggtcttgataacctctgcaagctc

SEQ ID NO: 27808 - DNA, 25 bp, synthetic construct
  misc_feature 1..25: note = Oligonucleotide
  source 1..25: mol_type = other DNA
tgtgggtcttgataacctctgcaag

SEQ ID NO: 27809 - DNA, 25 bp, synthetic construct
  misc_feature 1..25: note = Oligonucleotide
  source 1..25: mol_type = other DNA
ctttgtgggtcttgataacctctgc

SEQ ID NO: 27810 - DNA, 25 bp, synthetic construct
  misc_feature 1..25: note = Oligonucleotide
  source 1..25: mol_type = other DNA
agtctttgtgggtcttgataacctc

SEQ ID NO: 27811 - DNA, 25 bp, synthetic construct
  misc_feature 1..25: note = Oligonucleotide
  source 1..25: mol_type = other DNA
ccgagtctttgtgggtcttgataac

SEQ ID NO: 27812 - DNA, 25 bp, synthetic construct
  misc_feature 1..25: note = Oligonucleotide
  source 1..25: mol_type = other DNA
catccgagtctttgtgggtcttgat

SEQ ID NO: 27813 - DNA, 25 bp, synthetic construct
  misc_feature 1..25: note = Oligonucleotide
  source 1..25: mol_type = other DNA
caacatccgagtctttgtgggtctt

SEQ ID NO: 27814 - DNA, 25 bp, synthetic construct
  misc_feature 1..25: note = Oligonucleotide
  source 1..25: mol_type = other DNA
caccaacatccgagtctttgtgggt

SEQ ID NO: 27815 - DNA, 25 bp, synthetic construct
  misc_feature 1..25: note = Oligonucleotide
  source 1..25: mol_type = other DNA
actcaccaacatccgagtctttgtg

SEQ ID NO: 27816 - DNA, 25 bp, synthetic construct
  misc_feature 1..25: note = Oligonucleotide
  source 1..25: mol_type = other DNA
agaactcaccaacatccgagtcttt

SEQ ID NO: 27817 - DNA, 25 bp, synthetic construct
  misc_feature 1..25: note = Oligonucleotide
  source 1..25: mol_type = other DNA
ggcagaactcaccaacatccgagtc

SEQ ID NO: 27818 - DNA, 25 bp, synthetic construct
  misc_feature 1..25: note = Oligonucleotide
  source 1..25: mol_type = other DNA
gtgggcagaactcaccaacatccga

SEQ ID NO: 27819 - DNA, 25 bp, synthetic construct
  misc_feature 1..25: note = Oligonucleotide
  source 1..25: mol_type = other DNA
caggtgggcagaactcaccaacatc

SEQ ID NO: 27820 - DNA, 25 bp, synthetic construct
  misc_feature 1..25: note = Oligonucleotide
  source 1..25: mol_type = other DNA
gcccaggtgggcagaactcaccaac

SEQ ID NO: 27821 - DNA, 25 bp, synthetic construct
  misc_feature 1..25: note = Oligonucleotide
  source 1..25: mol_type = other DNA
gtcgcccaggtgggcagaactcacc

SEQ ID NO: 27822 - DNA, 25 bp, synthetic construct
  misc_feature 1..25: note = Oligonucleotide
  source 1..25: mol_type = other DNA
agggtcgcccaggtgggcagaactc

SEQ ID NO: 27823 - DNA, 25 bp, synthetic construct
  misc_feature 1..25: note = Oligonucleotide
  source 1..25: mol_type = other DNA
agcagggtcgcccaggtgggcagaa

SEQ ID NO: 27824 - DNA, 25 bp, synthetic construct
  misc_feature 1..25: note = Oligonucleotide
  source 1..25: mol_type = other DNA
ttcagcagggtcgcccaggtgggca

SEQ ID NO: 27825 - DNA, 25 bp, synthetic construct
  misc_feature 1..25: note = Oligonucleotide
  source 1..25: mol_type = other DNA
acattcagcagggtcgcccaggtgg

SEQ ID NO: 27826 - DNA, 25 bp, synthetic construct
  misc_feature 1..25: note = Oligonucleotide
  source 1..25: mol_type = other DNA
tctacattcagcagggtcgcccagg

SEQ ID NO: 27827 - DNA, 25 bp, synthetic construct
  misc_feature 1..25: note = Oligonucleotide
  source 1..25: mol_type = other DNA
gaatctacattcagcagggtcgccc

SEQ ID NO: 27828 - DNA, 25 bp, synthetic construct
  misc_feature 1..25: note = Oligonucleotide
  source 1..25: mol_type = other DNA
cacgaatctacattcagcagggtcg

SEQ ID NO: 27829 - DNA, 25 bp, synthetic construct
  misc_feature 1..25: note = Oligonucleotide
  source 1..25: mol_type = other DNA
ccacacgaatctacattcagcaggg

SEQ ID NO: 27830 - DNA, 25 bp, synthetic construct
  misc_feature 1..25: note = Oligonucleotide
  source 1..25: mol_type = other DNA
aaaccacacgaatctacattcagca

SEQ ID NO: 27831 - DNA, 25 bp, synthetic construct
  misc_feature 1..25: note = Oligonucleotide
  source 1..25: mol_type = other DNA
agaaaaccacacgaatctacattca

SEQ ID NO: 27832 - DNA, 25 bp, synthetic construct
  misc_feature 1..25: note = Oligonucleotide
  source 1..25: mol_type = other DNA
cccagaaaaccacacgaatctacat

SEQ ID NO: 27833 - DNA, 25 bp, synthetic construct
  misc_feature 1..25: note = Oligonucleotide
  source 1..25: mol_type = other DNA
ggccccagaaaaccacacgaatcta

SEQ ID NO: 27834 - DNA, 25 bp, synthetic construct
  misc_feature 1..25: note = Oligonucleotide
  source 1..25: mol_type = other DNA
ctgggccccagaaaaccacacgaat

SEQ ID NO: 27835 - DNA, 25 bp, synthetic construct
  misc_feature 1..25: note = Oligonucleotide
  source 1..25: mol_type = other DNA
ctgctgggccccagaaaaccacacg

SEQ ID NO: 27836 - DNA, 25 bp, synthetic construct
  misc_feature 1..25: note = Oligonucleotide
  source 1..25: mol_type = other DNA
catctgctgggccccagaaaaccac

SEQ ID NO: 27837 - DNA, 25 bp, synthetic construct
  misc_feature 1..25: note = Oligonucleotide
  source 1..25: mol_type = other DNA
ccacatctgctgggccccagaaaac

SEQ ID NO: 27838 - DNA, 25 bp, synthetic construct
  misc_feature 1..25: note = Oligonucleotide
  source 1..25: mol_type = other DNA
cccccacatctgctgggccccagaa

SEQ ID NO: 27839 - DNA, 25 bp, synthetic construct
  misc_feature 1..25: note = Oligonucleotide
  source 1..25: mol_type = other DNA
tgacccccacatctgctgggcccca

SEQ ID NO: 27840 - DNA, 25 bp, synthetic construct
  misc_feature 1..25: note = Oligonucleotide
  source 1..25: mol_type = other DNA
cactgacccccacatctgctgggcc

SEQ ID NO: 27841 - DNA, 25 bp, synthetic construct
  misc_feature 1..25: note = Oligonucleotide
  source 1..25: mol_type = other DNA
caccactgacccccacatctgctgg

SEQ ID NO: 27842 - DNA, 25 bp, synthetic construct
  misc_feature 1..25: note = Oligonucleotide
  source 1..25: mol_type = other DNA
tgtcaccactgacccccacatctgc

SEQ ID NO: 27843 - DNA, 25 bp, synthetic construct
  misc_feature 1..25: note = Oligonucleotide
  source 1..25: mol_type = other DNA
ttatgtcaccactgacccccacatc

SEQ ID NO: 27844 - DNA, 25 bp, synthetic construct
  misc_feature 1..25: note = Oligonucleotide
  source 1..25: mol_type = other DNA
cctttatgtcaccactgacccccac

SEQ ID NO: 27845 - DNA, 25 bp, synthetic construct
  misc_feature 1..25: note = Oligonucleotide
  source 1..25: mol_type = other DNA
gcccctttatgtcaccactgacccc

SEQ ID NO: 27846 - DNA, 25 bp, synthetic construct
  misc_feature 1..25: note = Oligonucleotide
  source 1..25: mol_type = other DNA
ggggcccctttatgtcaccactgac

SEQ ID NO: 27847 - DNA, 25 bp, synthetic construct
  misc_feature 1..25: note = Oligonucleotide
  source 1..25: mol_type = other DNA
tgtggggcccctttatgtcaccact

SEQ ID NO: 27848 - DNA, 25 bp, synthetic construct
  misc_feature 1..25: note = Oligonucleotide
  source 1..25: mol_type = other DNA
gggtgtggggcccctttatgtcacc

SEQ ID NO: 27849 - DNA, 25 bp, synthetic construct
  misc_feature 1..25: note = Oligonucleotide
  source 1..25: mol_type = other DNA
gtggggtgtggggcccctttatgtc

SEQ ID NO: 27850 - DNA, 25 bp, synthetic construct
  misc_feature 1..25: note = Oligonucleotide
  source 1..25: mol_type = other DNA
gatgtggggtgtggggcccctttat

SEQ ID NO: 27851 - DNA, 25 bp, synthetic construct
  misc_feature 1..25: note = Oligonucleotide
  source 1..25: mol_type = other DNA
gtagatgtggggtgtggggcccctt

SEQ ID NO: 27852 - DNA, 25 bp, synthetic construct
  misc_feature 1..25: note = Oligonucleotide
  source 1..25: mol_type = other DNA
agtgtagatgtggggtgtggggccc

SEQ ID NO: 27853 - DNA, 25 bp, synthetic construct
  misc_feature 1..25: note = Oligonucleotide
  source 1..25: mol_type = other DNA
cacagtgtagatgtggggtgtgggg

SEQ ID NO: 27854 - DNA, 25 bp, synthetic construct
  misc_feature 1..25: note = Oligonucleotide
  source 1..25: mol_type = other DNA
ccacacagtgtagatgtggggtgtg

SEQ ID NO: 27855 - DNA, 25 bp, synthetic construct
  misc_feature 1..25: note = Oligonucleotide
  source 1..25: mol_type = other DNA
tggccacacagtgtagatgtggggt

SEQ ID NO: 27856 - DNA, 25 bp, synthetic construct
  misc_feature 1..25: note = Oligonucleotide
  source 1..25: mol_type = other DNA
cactggccacacagtgtagatgtgg

SEQ ID NO: 27857 - DNA, 25 bp, synthetic construct
  misc_feature 1..25: note = Oligonucleotide
  source 1..25: mol_type = other DNA
gaccactggccacacagtgtagatg

SEQ ID NO: 27858 - DNA, 25 bp, synthetic construct
  misc_feature 1..25: note = Oligonucleotide
  source 1..25: mol_type = other DNA
agagaccactggccacacagtgtag

SEQ ID NO: 27859 - DNA, 25 bp, synthetic construct
  misc_feature 1..25: note = Oligonucleotide
  source 1..25: mol_type = other DNA
ctcagagaccactggccacacagtg

SEQ ID NO: 27860 - DNA, 25 bp, synthetic construct
  misc_feature 1..25: note = Oligonucleotide
  source 1..25: mol_type = other DNA
ccactcagagaccactggccacaca

SEQ ID NO: 27861 - DNA, 25 bp, synthetic construct
  misc_feature 1..25: note = Oligonucleotide
  source 1..25: mol_type = other DNA
tggccactcagagaccactggccac

SEQ ID NO: 27862 - DNA, 25 bp, synthetic construct
  misc_feature 1..25: note = Oligonucleotide
  source 1..25: mol_type = other DNA
cagtggccactcagagaccactggc

SEQ ID NO: 27863 - DNA, 25 bp, synthetic construct
  misc_feature 1..25: note = Oligonucleotide
  source 1..25: mol_type = other DNA
ccgcagtggccactcagagaccact

SEQ ID NO: 27864 - DNA, 25 bp, synthetic construct
  misc_feature 1..25: note = Oligonucleotide
  source 1..25: mol_type = other DNA
tgcccgcagtggccactcagagacc

SEQ ID NO: 27865 - DNA, 25 bp, synthetic construct
  misc_feature 1..25: note = Oligonucleotide
  source 1..25: mol_type = other DNA
tcatgcccgcagtggccactcagag

SEQ ID NO: 27866 - DNA, 25 bp, synthetic construct
  misc_feature 1..25: note = Oligonucleotide
  source 1..25: mol_type = other DNA
tcctcatgcccgcagtggccactca

SEQ ID NO: 27867 - DNA, 25 bp, synthetic construct
  misc_feature 1..25: note = Oligonucleotide
  source 1..25: mol_type = other DNA
cgttcctcatgcccgcagtggccac

SEQ ID NO: 27868 - DNA, 25 bp, synthetic construct
  misc_feature 1..25: note = Oligonucleotide
  source 1..25: mol_type = other DNA
gcccgttcctcatgcccgcagtggc

SEQ ID NO: 27869 - DNA, 25 bp, synthetic construct
  misc_feature 1..25: note = Oligonucleotide
  source 1..25: mol_type = other DNA
gtggcccgttcctcatgcccgcagt

SEQ ID NO: 27870 - DNA, 25 bp, synthetic construct
  misc_feature 1..25: note = Oligonucleotide
  source 1..25: mol_type = other DNA
cctgtggcccgttcctcatgcccgc

SEQ ID NO: 27871 - DNA, 25 bp, synthetic construct
  misc_feature 1..25: note = Oligonucleotide
  source 1..25: mol_type = other DNA
ggccctgtggcccgttcctcatgcc

SEQ ID NO: 27872 - DNA, 25 bp, synthetic construct
  misc_feature 1..25: note = Oligonucleotide
  source 1..25: mol_type = other DNA
acaggccctgtggcccgttcctcat

SEQ ID NO: 27873 - DNA, 25 bp, synthetic construct
  misc_feature 1..25: note = Oligonucleotide
  source 1..25: mol_type = other DNA
aacacaggccctgtggcccgttcct

SEQ ID NO: 27874 - DNA, 25 bp, synthetic construct
  misc_feature 1..25: note = Oligonucleotide
  source 1..25: mol_type = other DNA
ctcaacacaggccctgtggcccgtt

SEQ ID NO: 27875 - DNA, 25 bp, synthetic construct
  misc_feature 1..25: note = Oligonucleotide
  source 1..25: mol_type = other DNA
tcactcaacacaggccctgtggccc

SEQ ID NO: 27876 - DNA, 25 bp, synthetic construct
  misc_feature 1..25: note = Oligonucleotide
  source 1..25: mol_type = other DNA
tgttcactcaacacaggccctgtgg

SEQ ID NO: 27877 - DNA, 25 bp, synthetic construct
  misc_feature 1..25: note = Oligonucleotide
  source 1..25: mol_type = other DNA
caatgttcactcaacacaggccctg

SEQ ID NO: 27878 - DNA, 25 bp, synthetic construct
  misc_feature 1..25: note = Oligonucleotide
  source 1..25: mol_type = other DNA
aaacaatgttcactcaacacaggcc

SEQ ID NO: 27879 - DNA, 25 bp, synthetic construct
  misc_feature 1..25: note = Oligonucleotide
  source 1..25: mol_type = other DNA
caaaaacaatgttcactcaacacag

SEQ ID NO: 27880 - DNA, 25 bp, synthetic construct
  misc_feature 1..25: note = Oligonucleotide
  source 1..25: mol_type = other DNA
gaccaaaaacaatgttcactcaaca

SEQ ID NO: 27881 - DNA, 25 bp, synthetic construct
  misc_feature 1..25: note = Oligonucleotide
  source 1..25: mol_type = other DNA
ccagaccaaaaacaatgttcactca

SEQ ID NO: 27882 - DNA, 25 bp, synthetic construct
  misc_feature 1..25: note = Oligonucleotide
  source 1..25: mol_type = other DNA
ctcccagaccaaaaacaatgttcac

SEQ ID NO: 27883 - DNA, 25 bp, synthetic construct
  misc_feature 1..25: note = Oligonucleotide
  source 1..25: mol_type = other DNA
cttctcccagaccaaaaacaatgtt

SEQ ID NO: 27884 - DNA, 25 bp, synthetic construct
  misc_feature 1..25: note = Oligonucleotide
  source 1..25: mol_type = other DNA
gctcttctcccagaccaaaaacaat

SEQ ID NO: 27885 - DNA, 25 bp, synthetic construct
  misc_feature 1..25: note = Oligonucleotide
  source 1..25: mol_type = other DNA
catgctcttctcccagaccaaaaac

SEQ ID NO: 27886 - DNA, 25 bp, synthetic construct
  misc_feature 1..25: note = Oligonucleotide
  source 1..25: mol_type = other DNA
caccatgctcttctcccagaccaaa

SEQ ID NO: 27887 - DNA, 25 bp, synthetic construct
  misc_feature 1..25: note = Oligonucleotide
  source 1..25: mol_type = other DNA
cctcaccatgctcttctcccagacc

SEQ ID NO: 27888 - DNA, 25 bp, synthetic construct
  misc_feature 1..25: note = Oligonucleotide
  source 1..25: mol_type = other DNA
aaacctcaccatgctcttctcccag

SEQ ID NO: 27889 - DNA, 25 bp, synthetic construct
  misc_feature 1..25: note = Oligonucleotide
  source 1..25: mol_type = other DNA
cccaaacctcaccatgctcttctcc

SEQ ID NO: 27890 - DNA, 25 bp, synthetic construct
  misc_feature 1..25: note = Oligonucleotide
  source 1..25: mol_type = other DNA
cagcccaaacctcaccatgctcttc

SEQ ID NO: 27891 - DNA, 25 bp, synthetic construct
  misc_feature 1..25: note = Oligonucleotide
  source 1..25: mol_type = other DNA
ccacagcccaaacctcaccatgctc

SEQ ID NO: 27892 - DNA, 25 bp, synthetic construct
  misc_feature 1..25: note = Oligonucleotide
  source 1..25: mol_type = other DNA
ggcccacagcccaaacctcaccatg

SEQ ID NO: 27893 - DNA, 25 bp, synthetic construct
  misc_feature 1..25: note = Oligonucleotide
  source 1..25: mol_type = other DNA
cccggcccacagcccaaacctcacc

SEQ ID NO: 27894 - DNA, 25 bp, synthetic construct
  misc_feature 1..25: note = Oligonucleotide
  source 1..25: mol_type = other DNA
agccccggcccacagcccaaacctc

SEQ ID NO: 27895 - DNA, 25 bp, synthetic construct
  misc_feature 1..25: note = Oligonucleotide
  source 1..25: mol_type = other DNA
gctagccccggcccacagcccaaac

SEQ ID NO: 27896 - DNA, 25 bp, synthetic construct
  misc_feature 1..25: note = Oligonucleotide
  source 1..25: mol_type = other DNA
aatgctagccccggcccacagccca

SEQ ID NO: 27897 - DNA, 25 bp, synthetic construct
  misc_feature 1..25: note = Oligonucleotide
  source 1..25: mol_type = other DNA
ctgaatgctagccccggcccacagc

SEQ ID NO: 27898 - DNA, 25 bp, synthetic construct
  misc_feature 1..25: note = Oligonucleotide
  source 1..25: mol_type = other DNA
aagctgaatgctagccccggcccac

SEQ ID NO: 27899 - DNA, 25 bp, synthetic construct
  misc_feature 1..25: note = Oligonucleotide
  source 1..25: mol_type = other DNA
cctaagctgaatgctagccccggcc

SEQ ID NO: 27900 - DNA, 25 bp, synthetic construct
  misc_feature 1..25: note = Oligonucleotide
  source 1..25: mol_type = other DNA
ccccctaagctgaatgctagccccg

SEQ ID NO: 27901 - DNA, 25 bp, synthetic construct
  misc_feature 1..25: note = Oligonucleotide
  source 1..25: mol_type = other DNA
ctgccccctaagctgaatgctagcc

SEQ ID NO: 27902 - DNA, 25 bp, synthetic construct
  misc_feature 1..25: note = Oligonucleotide
  source 1..25: mol_type = other DNA
atgctgccccctaagctgaatgcta

SEQ ID NO: 27903 - DNA, 25 bp, synthetic construct
  misc_feature 1..25: note = Oligonucleotide
  source 1..25: mol_type = other DNA
cctatgctgccccctaagctgaatg

SEQ ID NO: 27904 - DNA, 25 bp, synthetic construct
  misc_feature 1..25: note = Oligonucleotide
  source 1..25: mol_type = other DNA
caacctatgctgccccctaagctga

SEQ ID NO: 27905 - DNA, 25 bp, synthetic construct
  misc_feature 1..25: note = Oligonucleotide
  source 1..25: mol_type = other DNA
tctcaacctatgctgccccctaagc

SEQ ID NO: 27906 - DNA, 25 bp, synthetic construct
  misc_feature 1..25: note = Oligonucleotide
  source 1..25: mol_type = other DNA
cactctcaacctatgctgcccccta

SEQ ID NO: 27907 - DNA, 25 bp, synthetic construct
  misc_feature 1..25: note = Oligonucleotide
  source 1..25: mol_type = other DNA
ccccactctcaacctatgctgcccc

SEQ ID NO: 27908 - DNA, 25 bp, synthetic construct
  misc_feature 1..25: note = Oligonucleotide
  source 1..25: mol_type = other DNA
caaccccactctcaacctatgctgc

SEQ ID NO: 27909 - DNA, 25 bp, synthetic construct
  misc_feature 1..25: note = Oligonucleotide
  source 1..25: mol_type = other DNA
cttcaaccccactctcaacctatgc

SEQ ID NO: 27910 - DNA, 25 bp, synthetic construct
  misc_feature 1..25: note = Oligonucleotide
  source 1..25: mol_type = other DNA
taacttcaaccccactctcaaccta

SEQ ID NO: 27911 - DNA, 25 bp, synthetic construct
  misc_feature 1..25: note = Oligonucleotide
  source 1..25: mol_type = other DNA
ccctaacttcaaccccactctcaac

SEQ ID NO: 27912 - DNA, 25 bp, synthetic construct
  misc_feature 1..25: note = Oligonucleotide
  source 1..25: mol_type = other DNA
tgaccctaacttcaaccccactctc

SEQ ID NO: 27913 - DNA, 25 bp, synthetic construct
  misc_feature 1..25: note = Oligonucleotide
  source 1..25: mol_type = other DNA
ctctgaccctaacttcaaccccact

SEQ ID NO: 27914 - DNA, 25 bp, synthetic construct
  misc_feature 1..25: note = Oligonucleotide
  source 1..25: mol_type = other DNA
ggactctgaccctaacttcaacccc

SEQ ID NO: 27915 - DNA, 25 bp, synthetic construct
  misc_feature 1..25: note = Oligonucleotide
  source 1..25: mol_type = other DNA
cagggactctgaccctaacttcaac

SEQ ID NO: 27916 - DNA, 25 bp, synthetic construct
  misc_feature 1..25: note = Oligonucleotide
  source 1..25: mol_type = other DNA
aaacagggactctgaccctaacttc

SEQ ID NO: 27917 - DNA, 25 bp, synthetic construct
  misc_feature 1..25: note = Oligonucleotide
  source 1..25: mol_type = other DNA
gggaaacagggactctgaccctaac

SEQ ID NO: 27918 - DNA, 25 bp, synthetic construct
  misc_feature 1..25: note = Oligonucleotide
  source 1..25: mol_type = other DNA
aacgggaaacagggactctgaccct

SEQ ID NO: 27919 - DNA, 25 bp, synthetic construct
  misc_feature 1..25: note = Oligonucleotide
  source 1..25: mol_type = other DNA
tttaacgggaaacagggactctgac

SEQ ID NO: 27920 - DNA, 25 bp, synthetic construct
  misc_feature 1..25: note = Oligonucleotide
  source 1..25: mol_type = other DNA
ggatttaacgggaaacagggactct

SEQ ID NO: 27921 - DNA, 25 bp, synthetic construct
  misc_feature 1..25: note = Oligonucleotide
  source 1..25: mol_type = other DNA
ctaggatttaacgggaaacagggac

SEQ ID NO: 27922 - DNA, 25 bp, synthetic construct
  misc_feature 1..25: note = Oligonucleotide
  source 1..25: mol_type = other DNA
ttcctaggatttaacgggaaacagg

SEQ ID NO: 27923 - DNA, 25 bp, synthetic construct
  misc_feature 1..25: note = Oligonucleotide
  source 1..25: mol_type = other DNA
ctcttcctaggatttaacgggaaac

SEQ ID NO: 27924 - DNA, 25 bp, synthetic construct
  misc_feature 1..25: note = Oligonucleotide
  source 1..25: mol_type = other DNA
tggctcttcctaggatttaacggga

SEQ ID NO: 27925 - DNA, 25 bp, synthetic construct
  misc_feature 1..25: note = Oligonucleotide
  source 1..25: mol_type = other DNA
tgctggctcttcctaggatttaacg

SEQ ID NO: 27926 - DNA, 25 bp, synthetic construct
  misc_feature 1..25: note = Oligonucleotide
  source 1..25: mol_type = other DNA
tcctgctggctcttcctaggattta

SEQ ID NO: 27927 - DNA, 25 bp, synthetic construct
  misc_feature 1..25: note = Oligonucleotide
  source 1..25: mol_type = other DNA
gtctcctgctggctcttcctaggat

SEQ ID NO: 27928 - DNA, 25 bp, synthetic construct
  misc_feature 1..25: note = Oligonucleotide
  source 1..25: mol_type = other DNA
catgtctcctgctggctcttcctag

SEQ ID NO: 27929 - DNA, 25 bp, synthetic construct
  misc_feature 1..25: note = Oligonucleotide
  source 1..25: mol_type = other DNA
ccccatgtctcctgctggctcttcc

SEQ ID NO: 27930 - DNA, 25 bp, synthetic construct
  misc_feature 1..25: note = Oligonucleotide
  source 1..25: mol_type = other DNA
cacccccatgtctcctgctggctct

SEQ ID NO: 27931 - DNA, 25 bp, synthetic construct
  misc_feature 1..25: note = Oligonucleotide
  source 1..25: mol_type = other DNA
caccacccccatgtctcctgctggc

SEQ ID NO: 27932 - DNA, 25 bp, synthetic construct
  misc_feature 1..25: note = Oligonucleotide
  source 1..25: mol_type = other DNA
gtccaccacccccatgtctcctgct

SEQ ID NO: 27933 - DNA, 25 bp, synthetic construct
  misc_feature 1..25: note = Oligonucleotide
  source 1..25: mol_type = other DNA
gaggtccaccacccccatgtctcct

SEQ ID NO: 27934 - DNA, 25 bp, synthetic construct
  misc_feature 1..25: note = Oligonucleotide
  source 1..25: mol_type = other DNA
agtgaggtccaccacccccatgtct

SEQ ID NO: 27935 - DNA, 25 bp, synthetic construct
  misc_feature 1..25: note = Oligonucleotide
  source 1..25: mol_type = other DNA
tgaagtgaggtccaccacccccatg

SEQ ID NO: 27936 - DNA, 25 bp, synthetic construct
  misc_feature 1..25: note = Oligonucleotide
  source 1..25: mol_type = other DNA
gggtgaagtgaggtccaccaccccc

SEQ ID NO: 27937 - DNA, 25 bp, synthetic construct
  misc_feature 1..25: note = Oligonucleotide
  source 1..25: mol_type = other DNA
ccagggtgaagtgaggtccaccacc

SEQ ID NO: 27938 - DNA, 25 bp, synthetic construct
  misc_feature 1..25: note = Oligonucleotide
  source 1..25: mol_type = other DNA
gctccagggtgaagtgaggtccacc

SEQ ID NO: 27939 - DNA, 25 bp, synthetic construct
  misc_feature 1..25: note = Oligonucleotide
  source 1..25: mol_type = other DNA
cttgctccagggtgaagtgaggtcc

SEQ ID NO: 27940 - DNA, 25 bp, synthetic construct
  misc_feature 1..25: note = Oligonucleotide
  source 1..25: mol_type = other DNA
atgcttgctccagggtgaagtgagg

SEQ ID NO: 27941 - DNA, 25 bp, synthetic construct
  misc_feature 1..25: note = Oligonucleotide
  source 1..25: mol_type = other DNA
ctcatgcttgctccagggtgaagtg

SEQ ID NO: 27942 - DNA, 25 bp, synthetic construct
  misc_feature 1..25: note = Oligonucleotide
  source 1..25: mol_type = other DNA
agactcatgcttgctccagggtgaa

SEQ ID NO: 27943 - DNA, 25 bp, synthetic construct
  misc_feature 1..25: note = Oligonucleotide
  source 1..25: mol_type = other DNA
ccaagactcatgcttgctccagggt

SEQ ID NO: 27944 - DNA, 25 bp, synthetic construct
  misc_feature 1..25: note = Oligonucleotide
  source 1..25: mol_type = other DNA
ccaccaagactcatgcttgctccag

SEQ ID NO: 27945 - DNA, 25 bp, synthetic construct
  misc_feature 1..25: note = Oligonucleotide
  source 1..25: mol_type = other DNA
ggaccaccaagactcatgcttgctc

SEQ ID NO: 27946 - DNA, 25 bp, synthetic construct
  misc_feature 1..25: note = Oligonucleotide
  source 1..25: mol_type = other DNA
tacggaccaccaagactcatgcttg

SEQ ID NO: 27947 - DNA, 25 bp, synthetic construct
  misc_feature 1..25: note = Oligonucleotide
  source 1..25: mol_type = other DNA
tgctacggaccaccaagactcatgc

SEQ ID NO: 27948 - DNA, 25 bp, synthetic construct
  misc_feature 1..25: note = Oligonucleotide
  source 1..25: mol_type = other DNA
gcttgctacggaccaccaagactca

SEQ ID NO: 27949 - DNA, 25 bp, synthetic construct
  misc_feature 1..25: note = Oligonucleotide
  source 1..25: mol_type = other DNA
agagcttgctacggaccaccaagac

SEQ ID NO: 27950 - DNA, 25 bp, synthetic construct
  misc_feature 1..25: note = Oligonucleotide
  source 1..25: mol_type = other DNA
ctgagagcttgctacggaccaccaa

SEQ ID NO: 27951 - DNA, 25 bp, synthetic construct
  misc_feature 1..25: note = Oligonucleotide
  source 1..25: mol_type = other DNA
atgctgagagcttgctacggaccac

SEQ ID NO: 27952 - DNA, 25 bp, synthetic construct
  misc_feature 1..25: note = Oligonucleotide
  source 1..25: mol_type = other DNA
tccatgctgagagcttgctacggac

SEQ ID NO: 27953 - DNA, 25 bp, synthetic construct
  misc_feature 1..25: note = Oligonucleotide
  source 1..25: mol_type = other DNA
ctttccatgctgagagcttgctacg

SEQ ID NO: 27954 - DNA, 25 bp, synthetic construct
  misc_feature 1..25: note = Oligonucleotide
  source 1..25: mol_type = other DNA
gatctttccatgctgagagcttgct

SEQ ID NO: 27955 - DNA, 25 bp, synthetic construct
  misc_feature 1..25: note = Oligonucleotide
  source 1..25: mol_type = other DNA
catgatctttccatgctgagagctt

SEQ ID NO: 27956 - DNA, 25 bp, synthetic construct
  misc_feature 1..25: note = Oligonucleotide
  source 1..25: mol_type = other DNA
ttacatgatctttccatgctgagag

SEQ ID NO: 27957 - DNA, 25 bp, synthetic construct
  misc_feature 1..25: note = Oligonucleotide
  source 1..25: mol_type = other DNA
cgtttacatgatctttccatgctga

SEQ ID NO: 27958 - DNA, 25 bp, synthetic construct
  misc_feature 1..25: note = Oligonucleotide
  source 1..25: mol_type = other DNA
tgtcgtttacatgatctttccatgc

SEQ ID NO: 27959 - DNA, 25 bp, synthetic construct
  misc_feature 1..25: note = Oligonucleotide
  source 1..25: mol_type = other DNA
atgtgtcgtttacatgatctttcca

SEQ ID NO: 27960 - DNA, 25 bp, synthetic construct
  misc_feature 1..25: note = Oligonucleotide
  source 1..25: mol_type = other DNA
cttatgtgtcgtttacatgatcttt

SEQ ID NO: 27961 - DNA, 25 bp, synthetic construct
  misc_feature 1..25: note = Oligonucleotide
  source 1..25: mol_type = other DNA
ttccttatgtgtcgtttacatgatc

SEQ ID NO: 27962 - DNA, 25 bp, synthetic construct
  misc_feature 1..25: note = Oligonucleotide
  source 1..25: mol_type = other DNA
gttttccttatgtgtcgtttacatg

SEQ ID NO: 27963 - DNA, 25 bp, synthetic construct
  misc_feature 1..25: note = Oligonucleotide
  source 1..25: mol_type = other DNA
gttgttttccttatgtgtcgtttac

SEQ ID NO: 27964 - DNA, 25 bp, synthetic construct
  misc_feature 1..25: note = Oligonucleotide
  source 1..25: mol_type = other DNA
actgttgttttccttatgtgtcgtt

SEQ ID NO: 27965 - DNA, 25 bp, synthetic construct
  misc_feature 1..25: note = Oligonucleotide
  source 1..25: mol_type = other DNA
atcactgttgttttccttatgtgtc

SEQ ID NO: 27966 - DNA, 25 bp, synthetic construct
  misc_feature 1..25: note = Oligonucleotide
  source 1..25: mol_type = other DNA
cccatcactgttgttttccttatgt

SEQ ID NO: 27967 - DNA, 25 bp, synthetic construct
  misc_feature 1..25: note = Oligonucleotide
  source 1..25: mol_type = other DNA
tttcccatcactgttgttttcctta

SEQ ID NO: 27968 - DNA, 25 bp, synthetic construct
  misc_feature 1..25: note = Oligonucleotide
  source 1..25: mol_type = other DNA
tgctttcccatcactgttgttttcc

SEQ ID NO: 27969 - DNA, 25 bp, synthetic construct
  misc_feature 1..25: note = Oligonucleotide
  source 1..25: mol_type = other DNA
ttctgctttcccatcactgttgttt

SEQ ID NO: 27970 - DNA, 25 bp, synthetic construct
  misc_feature 1..25: note = Oligonucleotide
  source 1..25: mol_type = other DNA
ccattctgctttcccatcactgttg

SEQ ID NO: 27971 - DNA, 25 bp, synthetic construct
  misc_feature 1..25: note = Oligonucleotide
  source 1..25: mol_type = other DNA
gccccattctgctttcccatcactg

SEQ ID NO: 27972 - DNA, 25 bp, synthetic construct
  misc_feature 1..25: note = Oligonucleotide
  source 1..25: mol_type = other DNA
ccagccccattctgctttcccatca

SEQ ID NO: 27973 - DNA, 25 bp, synthetic construct
  misc_feature 1..25: note = Oligonucleotide
  source 1..25: mol_type = other DNA
ttcccagccccattctgctttccca

SEQ ID NO: 27974 - DNA, 25 bp, synthetic construct
  misc_feature 1..25: note = Oligonucleotide
  source 1..25: mol_type = other DNA
ctattcccagccccattctgctttc

SEQ ID NO: 27975 - DNA, 25 bp, synthetic construct
  misc_feature 1..25: note = Oligonucleotide
  source 1..25: mol_type = other DNA
gcactattcccagccccattctgct

SEQ ID NO: 27976 - DNA, 25 bp, synthetic construct
  misc_feature 1..25: note = Oligonucleotide
  source 1..25: mol_type = other DNA
atggcactattcccagccccattct

SEQ ID NO: 27977 - DNA, 25 bp, synthetic construct
  misc_feature 1..25: note = Oligonucleotide
  source 1..25: mol_type = other DNA
gctatggcactattcccagccccat

SEQ ID NO: 27978 - DNA, 25 bp, synthetic construct
  misc_feature 1..25: note = Oligonucleotide
  source 1..25: mol_type = other DNA
atggctatggcactattcccagccc

SEQ ID NO: 27979 - DNA, 25 bp, synthetic construct
  misc_feature 1..25: note = Oligonucleotide
  source 1..25: mol_type = other DNA
aggatggctatggcactattcccag

SEQ ID NO: 27980 - DNA, 25 bp, synthetic construct
  misc_feature 1..25: note = Oligonucleotide
  source 1..25: mol_type = other DNA
ctgaggatggctatggcactattcc

SEQ ID NO: 27981 - DNA, 25 bp, synthetic construct
  misc_feature 1..25: note = Oligonucleotide
  source 1..25: mol_type = other DNA
gccctgaggatggctatggcactat

SEQ ID NO: 27982 - DNA, 25 bp, synthetic construct
  misc_feature 1..25: note = Oligonucleotide
  source 1..25: mol_type = other DNA
cttgccctgaggatggctatggcac

SEQ ID NO: 27983 - DNA, 25 bp, synthetic construct
  misc_feature 1..25: note = Oligonucleotide
  source 1..25: mol_type = other DNA
ctccttgccctgaggatggctatgg

SEQ ID NO: 27984 - DNA, 25 bp, synthetic construct
  misc_feature 1..25: note = Oligonucleotide
  source 1..25: mol_type = other DNA
gagctccttgccctgaggatggcta

SEQ ID NO: 27985 - DNA, 25 bp, synthetic construct
  misc_feature 1..25: note = Oligonucleotide
  source 1..25: mol_type = other DNA
tcagagctccttgccctgaggatgg

SEQ ID NO: 27986 - DNA, 25 bp, synthetic construct
  misc_feature 1..25: note = Oligonucleotide
  source 1..25: mol_type = other DNA
ggctcagagctccttgccctgagga

SEQ ID NO: 27987 - DNA, 25 bp, synthetic construct
  misc_feature 1..25: note = Oligonucleotide
  source 1..25: mol_type = other DNA
gggggctcagagctccttgccctga

SEQ ID NO: 27988 - DNA, 25 bp, synthetic construct
  misc_feature 1..25: note = Oligonucleotide
  source 1..25: mol_type = other DNA
gcagggggctcagagctccttgccc

SEQ ID NO: 27989 - DNA, 25 bp, synthetic construct
  misc_feature 1..25: note = Oligonucleotide
  source 1..25: mol_type = other DNA
gcagcagggggctcagagctccttg

SEQ ID NO: 27990 - DNA, 25 bp, synthetic construct
  misc_feature 1..25: note = Oligonucleotide
  source 1..25: mol_type = other DNA
caggcagcagggggctcagagctcc

SEQ ID NO: 27991 - DNA, 25 bp, synthetic construct
  misc_feature 1..25: note = Oligonucleotide
  source 1..25: mol_type = other DNA
tcgcaggcagcagggggctcagagc

SEQ ID NO: 27992 - DNA, 25 bp, synthetic construct
  misc_feature 1..25: note = Oligonucleotide
  source 1..25: mol_type = other DNA
tactcgcaggcagcagggggctcag

SEQ ID NO: 27993 - DNA, 25 bp, synthetic construct
  misc_feature 1..25: note = Oligonucleotide
  source 1..25: mol_type = other DNA
ctctactcgcaggcagcagggggct

SEQ ID NO: 27994 - DNA, 25 bp, synthetic construct
  misc_feature 1..25: note = Oligonucleotide
  source 1..25: mol_type = other DNA
ttcctctactcgcaggcagcagggg

SEQ ID NO: 27995 - DNA, 25 bp, synthetic construct
  misc_feature 1..25: note = Oligonucleotide
  source 1..25: mol_type = other DNA
gctttcctctactcgcaggcagcag

SEQ ID NO: 27996 - DNA, 25 bp, synthetic construct
  misc_feature 1..25: note = Oligonucleotide
  source 1..25: mol_type = other DNA
caggctttcctctactcgcaggcag

SEQ ID NO: 27997 - DNA, 25 bp, synthetic construct
  misc_feature 1..25: note = Oligonucleotide
  source 1..25: mol_type = other DNA
caccaggctttcctctactcgcagg

SEQ ID NO: 27998 - DNA, 25 bp, synthetic construct
  misc_feature 1..25: note = Oligonucleotide
  source 1..25: mol_type = other DNA
acacaccaggctttcctctactcgc

SEQ ID NO: 27999 - DNA, 25 bp, synthetic construct
  misc_feature 1..25: note = Oligonucleotide
  source 1..25: mol_type = other DNA
cgcacacaccaggctttcctctact

SEQ ID NO: 28000 - DNA, 25 bp, synthetic construct
  misc_feature 1..25: note = Oligonucleotide
  source 1..25: mol_type = other DNA
tcacgcacacaccaggctttcctct

SEQ ID NO: 28001 - DNA, 25 bp, synthetic construct
  misc_feature 1..25: note = Oligonucleotide
  source 1..25: mol_type = other DNA
gagtcacgcacacaccaggctttcc

SEQ ID NO: 28002 - DNA, 25 bp, synthetic construct
  misc_feature 1..25: note = Oligonucleotide
  source 1..25: mol_type = other DNA
cgtgagtcacgcacacaccaggctt

SEQ ID NO: 28003 - DNA, 25 bp, synthetic construct
  misc_feature 1..25: note = Oligonucleotide
  source 1..25: mol_type = other DNA
gaccgtgagtcacgcacacaccagg

SEQ ID NO: 28004 - DNA, 25 bp, synthetic construct
  misc_feature 1..25: note = Oligonucleotide
  source 1..25: mol_type = other DNA
caggaccgtgagtcacgcacacacc

SEQ ID NO: 28005 - DNA, 25 bp, synthetic construct
  misc_feature 1..25: note = Oligonucleotide
  source 1..25: mol_type = other DNA
ttccaggaccgtgagtcacgcacac

SEQ ID NO: 28006 - DNA, 25 bp, synthetic construct
  misc_feature 1..25: note = Oligonucleotide
  source 1..25: mol_type = other DNA
tccttccaggaccgtgagtcacgca

SEQ ID NO: 28007 - DNA, 25 bp, synthetic construct
  misc_feature 1..25: note = Oligonucleotide
  source 1..25: mol_type = other DNA
ttttccttccaggaccgtgagtcac

SEQ ID NO: 28008 - DNA, 25 bp, synthetic construct
  misc_feature 1..25: note = Oligonucleotide
  source 1..25: mol_type = other DNA
tggttttccttccaggaccgtgagt

SEQ ID NO: 28009 - DNA, 25 bp, synthetic construct
  misc_feature 1..25: note = Oligonucleotide
  source 1..25: mol_type = other DNA
tcctggttttccttccaggaccgtg

SEQ ID NO: 28010 - DNA, 25 bp, synthetic construct
  misc_feature 1..25: note = Oligonucleotide
  source 1..25: mol_type = other DNA
gtctcctggttttccttccaggacc

SEQ ID NO: 28011 - DNA, 25 bp, synthetic construct
  misc_feature 1..25: note = Oligonucleotide
  source 1..25: mol_type = other DNA
tgtgtctcctggttttccttccagg

SEQ ID NO: 28012 - DNA, 25 bp, synthetic construct
  misc_feature 1..25: note = Oligonucleotide
  source 1..25: mol_type = other DNA
gtgtgtgtctcctggttttccttcc

SEQ ID NO: 28013 - DNA, 25 bp, synthetic construct
  misc_feature 1..25: note = Oligonucleotide
  source 1..25: mol_type = other DNA
cacgtgtgtgtctcctggttttcct

SEQ ID NO: 28014 - DNA, 25 bp, synthetic construct
  misc_feature 1..25: note = Oligonucleotide
  source 1..25: mol_type = other DNA
ggccacgtgtgtgtctcctggtttt

SEQ ID NO: 28015 - DNA, 25 bp, synthetic construct
  misc_feature 1..25: note = Oligonucleotide
  source 1..25: mol_type = other DNA
tgaggccacgtgtgtgtctcctggt

SEQ ID NO: 28016 - DNA, 25 bp, synthetic construct
  misc_feature 1..25: note = Oligonucleotide
  source 1..25: mol_type = other DNA
ggctgaggccacgtgtgtgtctcct

SEQ ID NO: 28017 - DNA, 25 bp, synthetic construct
  misc_feature 1..25: note = Oligonucleotide
  source 1..25: mol_type = other DNA
cctggctgaggccacgtgtgtgtct

SEQ ID NO: 28018 - DNA, 25 bp, synthetic construct
  misc_feature 1..25: note = Oligonucleotide
  source 1..25: mol_type = other DNA
tatcctggctgaggccacgtgtgtg

SEQ ID NO: 28019 - DNA, 25 bp, synthetic construct
  misc_feature 1..25: note = Oligonucleotide
  source 1..25: mol_type = other DNA
gggtatcctggctgaggccacgtgt

SEQ ID NO: 28020 - DNA, 25 bp, synthetic construct
  misc_feature 1..25: note = Oligonucleotide
  source 1..25: mol_type = other DNA
ctcgggtatcctggctgaggccacg

SEQ ID NO: 28021 - DNA, 25 bp, synthetic construct
  misc_feature 1..25: note = Oligonucleotide
  source 1..25: mol_type = other DNA
aggctcgggtatcctggctgaggcc

SEQ ID NO: 28022 - DNA, 25 bp, synthetic construct
  misc_feature 1..25: note = Oligonucleotide
  source 1..25: mol_type = other DNA
aagaggctcgggtatcctggctgag

SEQ ID NO: 28023 - DNA, 25 bp, synthetic construct
  misc_feature 1..25: note = Oligonucleotide
  source 1..25: mol_type = other DNA
tccaagaggctcgggtatcctggct

SEQ ID NO: 28024 - DNA, 25 bp, synthetic construct
  misc_feature 1..25: note = Oligonucleotide
  source 1..25: mol_type = other DNA
acctccaagaggctcgggtatcctg

SEQ ID NO: 28025 - DNA, 25 bp, synthetic construct
  misc_feature 1..25: note = Oligonucleotide
  source 1..25: mol_type = other DNA
gagacctccaagaggctcgggtatc

SEQ ID NO: 28026 - DNA, 25 bp, synthetic construct
  misc_feature 1..25: note = Oligonucleotide
  source 1..25: mol_type = other DNA
ccagagacctccaagaggctcgggt

SEQ ID NO: 28027 - DNA, 25 bp, synthetic construct
  misc_feature 1..25: note = Oligonucleotide
  source 1..25: mol_type = other DNA
ccaccagagacctccaagaggctcg

SEQ ID NO: 28028 - DNA, 25 bp, synthetic construct
  misc_feature 1..25: note = Oligonucleotide
  source 1..25: mol_type = other DNA
cacccaccagagacctccaagaggc

SEQ ID NO: 28029 - DNA, 25 bp, synthetic construct
  misc_feature 1..25: note = Oligonucleotide
  source 1..25: mol_type = other DNA
ccacacccaccagagacctccaaga

SEQ ID NO: 28030 - DNA, 25 bp, synthetic construct
  misc_feature 1..25: note = Oligonucleotide
  source 1..25: mol_type = other DNA
gccccacacccaccagagacctcca

SEQ ID NO: 28031 - DNA, 25 bp, synthetic construct
  misc_feature 1..25: note = Oligonucleotide
  source 1..25: mol_type = other DNA
ctggccccacacccaccagagacct

SEQ ID NO: 28032 - DNA, 25 bp, synthetic construct
  misc_feature 1..25: note = Oligonucleotide
  source 1..25: mol_type = other DNA
agcctggccccacacccaccagaga

SEQ ID NO: 28033 - DNA, 25 bp, synthetic construct
  misc_feature 1..25: note = Oligonucleotide
  source 1..25: mol_type = other DNA
cccagcctggccccacacccaccag

SEQ ID NO: 28034 - DNA, 25 bp, synthetic construct
  misc_feature 1..25: note = Oligonucleotide
  source 1..25: mol_type = other DNA
ggtcccagcctggccccacacccac

SEQ ID NO: 28035 - DNA, 25 bp, synthetic construct
  misc_feature 1..25: note = Oligonucleotide
  source 1..25: mol_type = other DNA
gacggtcccagcctggccccacacc

SEQ ID NO: 28036 - DNA, 25 bp, synthetic construct
  misc_feature 1..25: note = Oligonucleotide
  source 1..25: mol_type = other DNA
caggacggtcccagcctggccccac

SEQ ID NO: 28037 - DNA, 25 bp, synthetic construct
  misc_feature 1..25: note = Oligonucleotide
  source 1..25: mol_type = other DNA
caacaggacggtcccagcctggccc

SEQ ID NO: 28038 - DNA, 25 bp, synthetic construct
  misc_feature 1..25: note = Oligonucleotide
  source 1..25: mol_type = other DNA
ctacaacaggacggtcccagcctgg

SEQ ID NO: 28039 - DNA, 25 bp, synthetic construct
  misc_feature 1..25: note = Oligonucleotide
  source 1..25: mol_type = other DNA
cagctacaacaggacggtcccagcc

SEQ ID NO: 28040 - DNA, 25 bp, synthetic construct
  misc_feature 1..25: note = Oligonucleotide
  source 1..25: mol_type = other DNA
cggcagctacaacaggacggtccca

SEQ ID NO: 28041 - DNA, 25 bp, synthetic construct
  misc_feature 1..25: note = Oligonucleotide
  source 1..25: mol_type = other DNA
ctccggcagctacaacaggacggtc

SEQ ID NO: 28042 - DNA, 25 bp, synthetic construct
  misc_feature 1..25: note = Oligonucleotide
  source 1..25: mol_type = other DNA
ggactccggcagctacaacaggacg

SEQ ID NO: 28043 - DNA, 25 bp, synthetic construct
  misc_feature 1..25: note = Oligonucleotide
  source 1..25: mol_type = other DNA
aggggactccggcagctacaacagg

SEQ ID NO: 28044 - DNA, 25 bp, synthetic construct
  misc_feature 1..25: note = Oligonucleotide
  source 1..25: mol_type = other DNA
cagaggggactccggcagctacaac

SEQ ID NO: 28045 - DNA, 25 bp, synthetic construct
  misc_feature 1..25: note = Oligonucleotide
  source 1..25: mol_type = other DNA
tcccagaggggactccggcagctac

SEQ ID NO: 28046 - DNA, 25 bp, synthetic construct
  misc_feature 1..25: note = Oligonucleotide
  source 1..25: mol_type = other DNA
ctctcccagaggggactccggcagc

SEQ ID NO: 28047 - DNA, 25 bp, synthetic construct
  misc_feature 1..25: note = Oligonucleotide
  source 1..25: mol_type = other DNA
caactctcccagaggggactccggc

SEQ ID NO: 28048 - DNA, 25 bp, synthetic construct
  misc_feature 1..25: note = Oligonucleotide
  source 1..25: mol_type = other DNA
ctacaactctcccagaggggactcc

SEQ ID NO: 28049 - DNA, 25 bp, synthetic construct
  misc_feature 1..25: note = Oligonucleotide
  source 1..25: mol_type = other DNA
cagctacaactctcccagaggggac

SEQ ID NO: 28050 - DNA, 25 bp, synthetic construct
  misc_feature 1..25: note = Oligonucleotide
  source 1..25: mol_type = other DNA
cggcagctacaactctcccagaggg

SEQ ID NO: 28051 - DNA, 25 bp, synthetic construct
  misc_feature 1..25: note = Oligonucleotide
  source 1..25: mol_type = other DNA
ctccggcagctacaactctcccaga

SEQ ID NO: 28052 - DNA, 25 bp, synthetic construct
  misc_feature 1..25: note = Oligonucleotide
  source 1..25: mol_type = other DNA
ggactccggcagctacaactctccc

SEQ ID NO: 28053 - DNA, 25 bp, synthetic construct
  misc_feature 1..25: note = Oligonucleotide
  source 1..25: mol_type = other DNA
aggggactccggcagctacaactct

SEQ ID NO: 28054 - DNA, 25 bp, synthetic construct
  misc_feature 1..25: note = Oligonucleotide
  source 1..25: mol_type = other DNA
cagaggggactccggcagctacaac

SEQ ID NO: 28055 - DNA, 25 bp, synthetic construct
  misc_feature 1..25: note = Oligonucleotide
  source 1..25: mol_type = other DNA
tcccagaggggactccggcagctac

SEQ ID NO: 28056 - DNA, 25 bp, synthetic construct
  misc_feature 1..25: note = Oligonucleotide
  source 1..25: mol_type = other DNA
ctctcccagaggggactccggcagc

SEQ ID NO: 28057 - DNA, 25 bp, synthetic construct
  misc_feature 1..25: note = Oligonucleotide
  source 1..25: mol_type = other DNA
caactctcccagaggggactccggc

SEQ ID NO: 28058 - DNA, 25 bp, synthetic construct
  misc_feature 1..25: note = Oligonucleotide
  source 1..25: mol_type = other DNA
cagcaactctcccagaggggactcc

SEQ ID NO: 28059 - DNA, 25 bp, synthetic construct
  misc_feature 1..25: note = Oligonucleotide
  source 1..25: mol_type = other DNA
cagcagcaactctcccagaggggac

SEQ ID NO: 28060 - DNA, 25 bp, synthetic construct
  misc_feature 1..25: note = Oligonucleotide
  source 1..25: mol_type = other DNA
ggccagcagcaactctcccagaggg

SEQ ID NO: 28061 - DNA, 25 bp, synthetic construct
  misc_feature 1..25: note = Oligonucleotide
  source 1..25: mol_type = other DNA
cctggccagcagcaactctcccaga

SEQ ID NO: 28062 - DNA, 25 bp, synthetic construct
  misc_feature 1..25: note = Oligonucleotide
  source 1..25: mol_type = other DNA
cagcctggccagcagcaactctccc

SEQ ID NO: 28063 - DNA, 25 bp, synthetic construct
  misc_feature 1..25: note = Oligonucleotide
  source 1..25: mol_type = other DNA
tcccagcctggccagcagcaactct

SEQ ID NO: 28064 - DNA, 25 bp, synthetic construct
  misc_feature 1..25: note = Oligonucleotide
  source 1..25: mol_type = other DNA
cggtcccagcctggccagcagcaac

SEQ ID NO: 28065 - DNA, 25 bp, synthetic construct
  misc_feature 1..25: note = Oligonucleotide
  source 1..25: mol_type = other DNA
ggacggtcccagcctggccagcagc

SEQ ID NO: 28066 - DNA, 25 bp, synthetic construct
  misc_feature 1..25: note = Oligonucleotide
  source 1..25: mol_type = other DNA
acaggacggtcccagcctggccagc

SEQ ID NO: 28067 - DNA, 25 bp, synthetic construct
  misc_feature 1..25: note = Oligonucleotide
  source 1..25: mol_type = other DNA
acaacaggacggtcccagcctggcc

SEQ ID NO: 28068 - DNA, 25 bp, synthetic construct
  misc_feature 1..25: note = Oligonucleotide
  source 1..25: mol_type = other DNA
gctacaacaggacggtcccagcctg

SEQ ID NO: 28069 - DNA, 25 bp, synthetic construct
  misc_feature 1..25: note = Oligonucleotide
  source 1..25: mol_type = other DNA
gcagctacaacaggacggtcccagc

SEQ ID NO: 28070 - DNA, 25 bp, synthetic construct
  misc_feature 1..25: note = Oligonucleotide
  source 1..25: mol_type = other DNA
ccggcagctacaacaggacggtccc

SEQ ID NO: 28071 - DNA, 25 bp, synthetic construct
  misc_feature 1..25: note = Oligonucleotide
  source 1..25: mol_type = other DNA
actccggcagctacaacaggacggt

SEQ ID NO: 28072 - DNA, 25 bp, synthetic construct
  misc_feature 1..25: note = Oligonucleotide
  source 1..25: mol_type = other DNA
gggactccggcagctacaacaggac

SEQ ID NO: 28073 - DNA, 25 bp, synthetic construct
  misc_feature 1..25: note = Oligonucleotide
  source 1..25: mol_type = other DNA
gaggggactccggcagctacaacag

SEQ ID NO: 28074 - DNA, 25 bp, synthetic construct
  misc_feature 1..25: note = Oligonucleotide
  source 1..25: mol_type = other DNA
ccagaggggactccggcagctacaa

SEQ ID NO: 28075 - DNA, 25 bp, synthetic construct
  misc_feature 1..25: note = Oligonucleotide
  source 1..25: mol_type = other DNA
ctcccagaggggactccggcagcta

SEQ ID NO: 28076 - DNA, 25 bp, synthetic construct
  misc_feature 1..25: note = Oligonucleotide
  source 1..25: mol_type = other DNA
actctcccagaggggactccggcag

SEQ ID NO: 28077 - DNA, 25 bp, synthetic construct
  misc_feature 1..25: note = Oligonucleotide
  source 1..25: mol_type = other DNA
acaactctcccagaggggactccgg

SEQ ID NO: 28078 - DNA, 25 bp, synthetic construct
  misc_feature 1..25: note = Oligonucleotide
  source 1..25: mol_type = other DNA
gctacaactctcccagaggggactc

SEQ ID NO: 28079 - DNA, 25 bp, synthetic construct
  misc_feature 1..25: note = Oligonucleotide
  source 1..25: mol_type = other DNA
gcagctacaactctcccagagggga

SEQ ID NO: 28080 - DNA, 25 bp, synthetic construct
  misc_feature 1..25: note = Oligonucleotide
  source 1..25: mol_type = other DNA
ccggcagctacaactctcccagagg

SEQ ID NO: 28081 - DNA, 25 bp, synthetic construct
  misc_feature 1..25: note = Oligonucleotide
  source 1..25: mol_type = other DNA
actccggcagctacaactctcccag

SEQ ID NO: 28082 - DNA, 25 bp, synthetic construct
  misc_feature 1..25: note = Oligonucleotide
  source 1..25: mol_type = other DNA
gggactccggcagctacaactctcc

SEQ ID NO: 28083 - DNA, 25 bp, synthetic construct
  misc_feature 1..25: note = Oligonucleotide
  source 1..25: mol_type = other DNA
gaggggactccggcagctacaactc

SEQ ID NO: 28084 - DNA, 25 bp, synthetic construct
  misc_feature 1..25: note = Oligonucleotide
  source 1..25: mol_type = other DNA
ccagaggggactccggcagctacaa

SEQ ID NO: 28085 - DNA, 25 bp, synthetic construct
  misc_feature 1..25: note = Oligonucleotide
  source 1..25: mol_type = other DNA
ctcccagaggggactccggcagcta

SEQ ID NO: 28086 - DNA, 25 bp, synthetic construct
  misc_feature 1..25: note = Oligonucleotide
  source 1..25: mol_type = other DNA
actctcccagaggggactccggcag

SEQ ID NO: 28087 - DNA, 25 bp, synthetic construct
  misc_feature 1..25: note = Oligonucleotide
  source 1..25: mol_type = other DNA
gcaactctcccagaggggactccgg

SEQ ID NO: 28088 - DNA, 25 bp, synthetic construct
  misc_feature 1..25: note = Oligonucleotide
  source 1..25: mol_type = other DNA
gcagcaactctcccagaggggactc

SEQ ID NO: 28089 - DNA, 25 bp, synthetic construct
  misc_feature 1..25: note = Oligonucleotide
  source 1..25: mol_type = other DNA
ccagcagcaactctcccagagggga

SEQ ID NO: 28090 - DNA, 25 bp, synthetic construct
  misc_feature 1..25: note = Oligonucleotide
  source 1..25: mol_type = other DNA
tggccagcagcaactctcccagagg

SEQ ID NO: 28091 - DNA, 25 bp, synthetic construct
  misc_feature 1..25: note = Oligonucleotide
  source 1..25: mol_type = other DNA
gcctggccagcagcaactctcccag

SEQ ID NO: 28092 - DNA, 25 bp, synthetic construct
  misc_feature 1..25: note = Oligonucleotide
  source 1..25: mol_type = other DNA
ccagcctggccagcagcaactctcc

SEQ ID NO: 28093 - DNA, 25 bp, synthetic construct
  misc_feature 1..25: note = Oligonucleotide
  source 1..25: mol_type = other DNA
gtcccagcctggccagcagcaactc

SEQ ID NO: 28094 - DNA, 25 bp, synthetic construct
  misc_feature 1..25: note = Oligonucleotide
  source 1..25: mol_type = other DNA
accgtcccagcctggccagcagcaa

SEQ ID NO: 28095 - DNA, 25 bp, synthetic construct
  misc_feature 1..25: note = Oligonucleotide
  source 1..25: mol_type = other DNA
aggaccgtcccagcctggccagcag

SEQ ID NO: 28096 - DNA, 25 bp, synthetic construct
  misc_feature 1..25: note = Oligonucleotide
  source 1..25: mol_type = other DNA
aacaggaccgtcccagcctggccag

SEQ ID NO: 28097 - DNA, 25 bp, synthetic construct
  misc_feature 1..25: note = Oligonucleotide
  source 1..25: mol_type = other DNA
tacaacaggaccgtcccagcctggc

SEQ ID NO: 28098 - DNA, 25 bp, synthetic construct
  misc_feature 1..25: note = Oligonucleotide
  source 1..25: mol_type = other DNA
agctacaacaggaccgtcccagcct

SEQ ID NO: 28099 - DNA, 25 bp, synthetic construct
  misc_feature 1..25: note = Oligonucleotide
  source 1..25: mol_type = other DNA
ggcagctacaacaggaccgtcccag

SEQ ID NO: 28100 - DNA, 25 bp, synthetic construct
  misc_feature 1..25: note = Oligonucleotide
  source 1..25: mol_type = other DNA
tccggcagctacaacaggaccgtcc

SEQ ID NO: 28101 - DNA, 25 bp, synthetic construct
  misc_feature 1..25: note = Oligonucleotide
  source 1..25: mol_type = other DNA
gactccggcagctacaacaggaccg

SEQ ID NO: 28102 - DNA, 25 bp, synthetic construct
  misc_feature 1..25: note = Oligonucleotide
  source 1..25: mol_type = other DNA
ggggactccggcagctacaacagga

SEQ ID NO: 28103 - DNA, 25 bp, synthetic construct
  misc_feature 1..25: note = Oligonucleotide
  source 1..25: mol_type = other DNA
agaggggactccggcagctacaaca

SEQ ID NO: 28104 - DNA, 25 bp, synthetic construct
  misc_feature 1..25: note = Oligonucleotide
  source 1..25: mol_type = other DNA
cccagaggggactccggcagctaca

SEQ ID NO: 28105 - DNA, 25 bp, synthetic construct
  misc_feature 1..25: note = Oligonucleotide
  source 1..25: mol_type = other DNA
tctcccagaggggactccggcagct

SEQ ID NO: 28106 - DNA, 25 bp, synthetic construct
  misc_feature 1..25: note = Oligonucleotide
  source 1..25: mol_type = other DNA
aactctcccagaggggactccggca

SEQ ID NO: 28107 - DNA, 25 bp, synthetic construct
  misc_feature 1..25: note = Oligonucleotide
  source 1..25: mol_type = other DNA
agcaactctcccagaggggactccg

SEQ ID NO: 28108 - DNA, 25 bp, synthetic construct
  misc_feature 1..25: note = Oligonucleotide
  source 1..25: mol_type = other DNA
agcagcaactctcccagaggggact

SEQ ID NO: 28109 - DNA, 25 bp, synthetic construct
  misc_feature 1..25: note = Oligonucleotide
  source 1..25: mol_type = other DNA
gccagcagcaactctcccagagggg

SEQ ID NO: 28110 - DNA, 25 bp, synthetic construct
  misc_feature 1..25: note = Oligonucleotide
  source 1..25: mol_type = other DNA
ctggccagcagcaactctcccagag

SEQ ID NO: 28111 - DNA, 25 bp, synthetic construct
  misc_feature 1..25: note = Oligonucleotide
  source 1..25: mol_type = other DNA
agcctggccagcagcaactctccca

SEQ ID NO: 28112 - DNA, 25 bp, synthetic construct
  misc_feature 1..25: note = Oligonucleotide
  source 1..25: mol_type = other DNA
cccagcctggccagcagcaactctc

SEQ ID NO: 28113 - DNA, 25 bp, synthetic construct
  misc_feature 1..25: note = Oligonucleotide
  source 1..25: mol_type = other DNA
ggtcccagcctggccagcagcaact

SEQ ID NO: 28114 - DNA, 25 bp, synthetic construct
  misc_feature 1..25: note = Oligonucleotide
  source 1..25: mol_type = other DNA
gacggtcccagcctggccagcagca

SEQ ID NO: 28115 - DNA, 25 bp, synthetic construct
  misc_feature 1..25: note = Oligonucleotide
  source 1..25: mol_type = other DNA
caggacggtcccagcctggccagca

SEQ ID NO: 28116 - DNA, 25 bp, synthetic construct
  misc_feature 1..25: note = Oligonucleotide
  source 1..25: mol_type = other DNA
caacaggacggtcccagcctggcca

SEQ ID NO: 28117 - DNA, 25 bp, synthetic construct
  misc_feature 1..25: note = Oligonucleotide
  source 1..25: mol_type = other DNA
ctacaacaggacggtcccagcctgg

SEQ ID NO: 28118 - DNA, 25 bp, synthetic construct
  misc_feature 1..25: note = Oligonucleotide
  source 1..25: mol_type = other DNA
cagctacaacaggacggtcccagcc

SEQ ID NO: 28119 - DNA, 25 bp, synthetic construct
  misc_feature 1..25: note = Oligonucleotide
  source 1..25: mol_type = other DNA
cggcagctacaacaggacggtccca

SEQ ID NO: 28120 - DNA, 25 bp, synthetic construct
  misc_feature 1..25: note = Oligonucleotide
  source 1..25: mol_type = other DNA
ctccggcagctacaacaggacggtc

SEQ ID NO: 28121 - DNA, 25 bp, synthetic construct
  misc_feature 1..25: note = Oligonucleotide
  source 1..25: mol_type = other DNA
ggactccggcagctacaacaggacg

SEQ ID NO: 28122 - DNA, 25 bp, synthetic construct
  misc_feature 1..25: note = Oligonucleotide
  source 1..25: mol_type = other DNA
aggggactccggcagctacaacagg

SEQ ID NO: 28123 - DNA, 25 bp, synthetic construct
  misc_feature 1..25: note = Oligonucleotide
  source 1..25: mol_type = other DNA
cagaggggactccggcagctacaac

SEQ ID NO: 28124 - DNA, 25 bp, synthetic construct
  misc_feature 1..25: note = Oligonucleotide
  source 1..25: mol_type = other DNA
tcccagaggggactccggcagctac

SEQ ID NO: 28125 - DNA, 25 bp, synthetic construct
  misc_feature 1..25: note = Oligonucleotide
  source 1..25: mol_type = other DNA
ctctcccagaggggactccggcagc

SEQ ID NO: 28126 - DNA, 25 bp, synthetic construct
  misc_feature 1..25: note = Oligonucleotide
  source 1..25: mol_type = other DNA
caactctcccagaggggactccggc

SEQ ID NO: 28127 - DNA, 25 bp, synthetic construct
  misc_feature 1..25: note = Oligonucleotide
  source 1..25: mol_type = other DNA
ctacaactctcccagaggggactcc

SEQ ID NO: 28128 - DNA, 25 bp, synthetic construct
  misc_feature 1..25: note = Oligonucleotide
  source 1..25: mol_type = other DNA
cagctacaactctcccagaggggac

SEQ ID NO: 28129 - DNA, 25 bp, synthetic construct
  misc_feature 1..25: note = Oligonucleotide
  source 1..25: mol_type = other DNA
cggcagctacaactctcccagaggg

SEQ ID NO: 28130 - DNA, 25 bp, synthetic construct
  misc_feature 1..25: note = Oligonucleotide
  source 1..25: mol_type = other DNA
ctccggcagctacaactctcccaga

SEQ ID NO: 28131 - DNA, 25 bp, synthetic construct
  misc_feature 1..25: note = Oligonucleotide
  source 1..25: mol_type = other DNA
ggactccggcagctacaactctccc

SEQ ID NO: 28132 - DNA, 25 bp, synthetic construct
  misc_feature 1..25: note = Oligonucleotide
  source 1..25: mol_type = other DNA
aggggactccggcagctacaactct

SEQ ID NO: 28133 - DNA, 25 bp, synthetic construct
  misc_feature 1..25: note = Oligonucleotide
  source 1..25: mol_type = other DNA
cagaggggactccggcagctacaac

SEQ ID NO: 28134 - DNA, 25 bp, synthetic construct
  misc_feature 1..25: note = Oligonucleotide
  source 1..25: mol_type = other DNA
tcccagaggggactccggcagctac

SEQ ID NO: 28135 - DNA, 25 bp, synthetic construct
  misc_feature 1..25: note = Oligonucleotide
  source 1..25: mol_type = other DNA
ctctcccagaggggactccggcagc

SEQ ID NO: 28136 - DNA, 25 bp, synthetic construct
  misc_feature 1..25: note = Oligonucleotide
  source 1..25: mol_type = other DNA
caactctcccagaggggactccggc

SEQ ID NO: 28137 - DNA, 25 bp, synthetic construct
  misc_feature 1..25: note = Oligonucleotide
  source 1..25: mol_type = other DNA
cagcaactctcccagaggggactcc

SEQ ID NO: 28138 - DNA, 25 bp, synthetic construct
  misc_feature 1..25: note = Oligonucleotide
  source 1..25: mol_type = other DNA
cagcagcaactctcccagaggggac

SEQ ID NO: 28139 - DNA, 25 bp, synthetic construct
  misc_feature 1..25: note = Oligonucleotide
  source 1..25: mol_type = other DNA
ggccagcagcaactctcccagaggg

SEQ ID NO: 28140 - DNA, 25 bp, synthetic construct
  misc_feature 1..25: note = Oligonucleotide
  source 1..25: mol_type = other DNA
cctggccagcagcaactctcccaga

SEQ ID NO: 28141 - DNA, 25 bp, synthetic construct
  misc_feature 1..25: note = Oligonucleotide
  source 1..25: mol_type = other DNA
cagcctggccagcagcaactctccc

SEQ ID NO: 28142 - DNA, 25 bp, synthetic construct
  misc_feature 1..25: note = Oligonucleotide
  source 1..25: mol_type = other DNA
tcccagcctggccagcagcaactct

SEQ ID NO: 28143 - DNA, 25 bp, synthetic construct
  misc_feature 1..25: note = Oligonucleotide
  source 1..25: mol_type = other DNA
ccgtcccagcctggccagcagcaac

SEQ ID NO: 28144 - DNA, 25 bp, synthetic construct
  misc_feature 1..25: note = Oligonucleotide
  source 1..25: mol_type = other DNA
ggaccgtcccagcctggccagcagc

SEQ ID NO: 28145 - DNA, 25 bp, synthetic construct
  misc_feature 1..25: note = Oligonucleotide
  source 1..25: mol_type = other DNA
acaggaccgtcccagcctggccagc

SEQ ID NO: 28146 - DNA, 25 bp, synthetic construct
  misc_feature 1..25: note = Oligonucleotide
  source 1..25: mol_type = other DNA
acaacaggaccgtcccagcctggcc

SEQ ID NO: 28147 - DNA, 25 bp, synthetic construct
  misc_feature 1..25: note = Oligonucleotide
  source 1..25: mol_type = other DNA
gctacaacaggaccgtcccagcctg

SEQ ID NO: 28148 - DNA, 25 bp, synthetic construct
  misc_feature 1..25: note = Oligonucleotide
  source 1..25: mol_type = other DNA
gcagctacaacaggaccgtcccagc

SEQ ID NO: 28149 - DNA, 25 bp, synthetic construct
  misc_feature 1..25: note = Oligonucleotide
  source 1..25: mol_type = other DNA
ccggcagctacaacaggaccgtccc

SEQ ID NO: 28150 - DNA, 25 bp, synthetic construct
  misc_feature 1..25: note = Oligonucleotide
  source 1..25: mol_type = other DNA
actccggcagctacaacaggaccgt

SEQ ID NO: 28151 - DNA, 25 bp, synthetic construct
  misc_feature 1..25: note = Oligonucleotide
  source 1..25: mol_type = other DNA
gggactccggcagctacaacaggac

SEQ ID NO: 28152 - DNA, 25 bp, synthetic construct
  misc_feature 1..25: note = Oligonucleotide
  source 1..25: mol_type = other DNA
gaggggactccggcagctacaacag

SEQ ID NO: 28153 - DNA, 25 bp, synthetic construct
  misc_feature 1..25: note = Oligonucleotide
  source 1..25: mol_type = other DNA
ccagaggggactccggcagctacaa

SEQ ID NO: 28154 - DNA, 25 bp, synthetic construct
  misc_feature 1..25: note = Oligonucleotide
  source 1..25: mol_type = other DNA
ctcccagaggggactccggcagcta

SEQ ID NO: 28155 - DNA, 25 bp, synthetic construct
  misc_feature 1..25: note = Oligonucleotide
  source 1..25: mol_type = other DNA
actctcccagaggggactccggcag

SEQ ID NO: 28156 - DNA, 25 bp, synthetic construct
  misc_feature 1..25: note = Oligonucleotide
  source 1..25: mol_type = other DNA
acaactctcccagaggggactccgg

SEQ ID NO: 28157 - DNA, 25 bp, synthetic construct
  misc_feature 1..25: note = Oligonucleotide
  source 1..25: mol_type = other DNA
gctacaactctcccagaggggactc

SEQ ID NO: 28158 - DNA, 25 bp, synthetic construct
  misc_feature 1..25: note = Oligonucleotide
  source 1..25: mol_type = other DNA
ccagctacaactctcccagagggga

SEQ ID NO: 28159 - DNA, 25 bp, synthetic construct
  misc_feature 1..25: note = Oligonucleotide
  source 1..25: mol_type = other DNA
tggccagctacaactctcccagagg

SEQ ID NO: 28160 - DNA, 25 bp, synthetic construct
  misc_feature 1..25: note = Oligonucleotide
  source 1..25: mol_type = other DNA
gcctggccagctacaactctcccag

SEQ ID NO: 28161 - DNA, 25 bp, synthetic construct
  misc_feature 1..25: note = Oligonucleotide
  source 1..25: mol_type = other DNA
ccagcctggccagctacaactctcc

SEQ ID NO: 28162 - DNA, 25 bp, synthetic construct
  misc_feature 1..25: note = Oligonucleotide
  source 1..25: mol_type = other DNA
gtcccagcctggccagctacaactc

SEQ ID NO: 28163 - DNA, 25 bp, synthetic construct
  misc_feature 1..25: note = Oligonucleotide
  source 1..25: mol_type = other DNA
acggtcccagcctggccagctacaa

SEQ ID NO: 28164 - DNA, 25 bp, synthetic construct
  misc_feature 1..25: note = Oligonucleotide
  source 1..25: mol_type = other DNA
aggacggtcccagcctggccagcta

SEQ ID NO: 28165 - DNA, 25 bp, synthetic construct
  misc_feature 1..25: note = Oligonucleotide
  source 1..25: mol_type = other DNA
aacaggacggtcccagcctggccag

SEQ ID NO: 28166 - DNA, 25 bp, synthetic construct
  misc_feature 1..25: note = Oligonucleotide
  source 1..25: mol_type = other DNA
tacaacaggacggtcccagcctggc

SEQ ID NO: 28167 - DNA, 25 bp, synthetic construct
  misc_feature 1..25: note = Oligonucleotide
  source 1..25: mol_type = other DNA
agctacaacaggacggtcccagcct

SEQ ID NO: 28168 - DNA, 25 bp, synthetic construct
  misc_feature 1..25: note = Oligonucleotide
  source 1..25: mol_type = other DNA
ggcagctacaacaggacggtcccag

SEQ ID NO: 28169 - DNA, 25 bp, synthetic construct
  misc_feature 1..25: note = Oligonucleotide
  source 1..25: mol_type = other DNA
tccggcagctacaacaggacggtcc

SEQ ID NO: 28170 - DNA, 25 bp, synthetic construct
  misc_feature 1..25: note = Oligonucleotide
  source 1..25: mol_type = other DNA
gactccggcagctacaacaggacgg

SEQ ID NO: 28171 - DNA, 25 bp, synthetic construct
  misc_feature 1..25: note = Oligonucleotide
  source 1..25: mol_type = other DNA
ggggactccggcagctacaacagga

SEQ ID NO: 28172 - DNA, 25 bp, synthetic construct
  misc_feature 1..25: note = Oligonucleotide
  source 1..25: mol_type = other DNA
agaggggactccggcagctacaaca

SEQ ID NO: 28173 - DNA, 25 bp, synthetic construct
  misc_feature 1..25: note = Oligonucleotide
  source 1..25: mol_type = other DNA
cccagaggggactccggcagctaca

SEQ ID NO: 28174 - DNA, 25 bp, synthetic construct
  misc_feature 1..25: note = Oligonucleotide
  source 1..25: mol_type = other DNA
tctcccagaggggactccggcagct

SEQ ID NO: 28175 - DNA, 25 bp, synthetic construct
  misc_feature 1..25: note = Oligonucleotide
  source 1..25: mol_type = other DNA
aactctcccagaggggactccggca

SEQ ID NO: 28176 - DNA, 25 bp, synthetic construct
  misc_feature 1..25: note = Oligonucleotide
  source 1..25: mol_type = other DNA
tacaactctcccagaggggactccg

SEQ ID NO: 28177 - DNA, 25 bp, synthetic construct
  misc_feature 1..25: note = Oligonucleotide
  source 1..25: mol_type = other DNA
agctacaactctcccagaggggact

SEQ ID NO: 28178 - DNA, 25 bp, synthetic construct
  misc_feature 1..25: note = Oligonucleotide
  source 1..25: mol_type = other DNA
ggcagctacaactctcccagagggg

SEQ ID NO: 28179 - DNA, 25 bp, synthetic construct
  misc_feature 1..25: note = Oligonucleotide
  source 1..25: mol_type = other DNA
tccggcagctacaactctcccagag

SEQ ID NO: 28180 - DNA, 25 bp, synthetic construct
  misc_feature 1..25: note = Oligonucleotide
  source 1..25: mol_type = other DNA
gactccggcagctacaactctccca

SEQ ID NO: 28181 - DNA, 25 bp, synthetic construct
  misc_feature 1..25: note = Oligonucleotide
  source 1..25: mol_type = other DNA
ggggactccggcagctacaactctc

SEQ ID NO: 28182 - DNA, 25 bp, synthetic construct
  misc_feature 1..25: note = Oligonucleotide
  source 1..25: mol_type = other DNA
agaggggactccggcagctacaact

SEQ ID NO: 28183 - DNA, 25 bp, synthetic construct
  misc_feature 1..25: note = Oligonucleotide
  source 1..25: mol_type = other DNA
cccagaggggactccggcagctaca

SEQ ID NO: 28184 - DNA, 25 bp, synthetic construct
  misc_feature 1..25: note = Oligonucleotide
  source 1..25: mol_type = other DNA
tctcccagaggggactccggcagct

SEQ ID NO: 28185 - DNA, 25 bp, synthetic construct
  misc_feature 1..25: note = Oligonucleotide
  source 1..25: mol_type = other DNA
aactctcccagaggggactccggca

SEQ ID NO: 28186 - DNA, 25 bp, synthetic construct
  misc_feature 1..25: note = Oligonucleotide
  source 1..25: mol_type = other DNA
agcaactctcccagaggggactccg

SEQ ID NO: 28187 - DNA, 25 bp, synthetic construct
  misc_feature 1..25: note = Oligonucleotide
  source 1..25: mol_type = other DNA
agcagcaactctcccagaggggact

SEQ ID NO: 28188 - DNA, 25 bp, synthetic construct
  misc_feature 1..25: note = Oligonucleotide
  source 1..25: mol_type = other DNA
gccagcagcaactctcccagagggg

SEQ ID NO: 28189 - DNA, 25 bp, synthetic construct
  misc_feature 1..25: note = Oligonucleotide
  source 1..25: mol_type = other DNA
ctggccagcagcaactctcccagag

SEQ ID NO: 28190 - DNA, 25 bp, synthetic construct
  misc_feature 1..25: note = Oligonucleotide
  source 1..25: mol_type = other DNA
agcctggccagcagcaactctccca

SEQ ID NO: 28191 - DNA, 25 bp, synthetic construct
  misc_feature 1..25: note = Oligonucleotide
  source 1..25: mol_type = other DNA
cccagcctggccagcagcaactctc

SEQ ID NO: 28192 - DNA, 25 bp, synthetic construct
  misc_feature 1..25: note = Oligonucleotide
  source 1..25: mol_type = other DNA
catcccagcctggccagcagcaact

SEQ ID NO: 28193 - DNA, 25 bp, synthetic construct
  misc_feature 1..25: note = Oligonucleotide
  source 1..25: mol_type = other DNA
gaccatcccagcctggccagcagca

SEQ ID NO: 28194 - DNA, 25 bp, synthetic construct
  misc_feature 1..25: note = Oligonucleotide
  source 1..25: mol_type = other DNA
caggaccatcccagcctggccagca

SEQ ID NO: 28195 - DNA, 25 bp, synthetic construct
  misc_feature 1..25: note = Oligonucleotide
  source 1..25: mol_type = other DNA
caacaggaccatcccagcctggcca

SEQ ID NO: 28196 - DNA, 25 bp, synthetic construct
  misc_feature 1..25: note = Oligonucleotide
  source 1..25: mol_type = other DNA
ctacaacaggaccatcccagcctgg

SEQ ID NO: 28197 - DNA, 25 bp, synthetic construct
  misc_feature 1..25: note = Oligonucleotide
  source 1..25: mol_type = other DNA
cagctacaacaggaccatcccagcc

SEQ ID NO: 28198 - DNA, 25 bp, synthetic construct
  misc_feature 1..25: note = Oligonucleotide
  source 1..25: mol_type = other DNA
cggcagctacaacaggaccatccca

SEQ ID NO: 28199 - DNA, 25 bp, synthetic construct
  misc_feature 1..25: note = Oligonucleotide
  source 1..25: mol_type = other DNA
ctccggcagctacaacaggaccatc

SEQ ID NO: 28200 - DNA, 25 bp, synthetic construct
  misc_feature 1..25: note = Oligonucleotide
  source 1..25: mol_type = other DNA
ggactccggcagctacaacaggacc

SEQ ID NO: 28201 - DNA, 25 bp, synthetic construct
  misc_feature 1..25: note = Oligonucleotide
  source 1..25: mol_type = other DNA
aggggactccggcagctacaacagg

SEQ ID NO: 28202 - DNA, 25 bp, synthetic construct
  misc_feature 1..25: note = Oligonucleotide
  source 1..25: mol_type = other DNA
cagaggggactccggcagctacaac

SEQ ID NO: 28203 - DNA, 25 bp, synthetic construct
  misc_feature 1..25: note = Oligonucleotide
  source 1..25: mol_type = other DNA
tcccagaggggactccggcagctac

SEQ ID NO: 28204 - DNA, 25 bp, synthetic construct
  misc_feature 1..25: note = Oligonucleotide
  source 1..25: mol_type = other DNA
ctctcccagaggggactccggcagc

SEQ ID NO: 28205 - DNA, 25 bp, synthetic construct
  misc_feature 1..25: note = Oligonucleotide
  source 1..25: mol_type = other DNA
caactctcccagaggggactccggc

SEQ ID NO: 28206 - DNA, 25 bp, synthetic construct
  misc_feature 1..25: note = Oligonucleotide
  source 1..25: mol_type = other DNA
cagcaactctcccagaggggactcc

SEQ ID NO: 28207 - DNA, 25 bp, synthetic construct
  misc_feature 1..25: note = Oligonucleotide
  source 1..25: mol_type = other DNA
cagcagcaactctcccagaggggac

SEQ ID NO: 28208 - DNA, 25 bp, synthetic construct
  misc_feature 1..25: note = Oligonucleotide
  source 1..25: mol_type = other DNA
ggccagcagcaactctcccagaggg

SEQ ID NO: 28209 - DNA, 25 bp, synthetic construct
  misc_feature 1..25: note = Oligonucleotide
  source 1..25: mol_type = other DNA
cctggccagcagcaactctcccaga

SEQ ID NO: 28210 - DNA, 25 bp, synthetic construct
  misc_feature 1..25: note = Oligonucleotide
  source 1..25: mol_type = other DNA
cagcctggccagcagcaactctccc

SEQ ID NO: 28211 - DNA, 25 bp, synthetic construct
  misc_feature 1..25: note = Oligonucleotide
  source 1..25: mol_type = other DNA
tcccagcctggccagcagcaactct

SEQ ID NO: 28212 - DNA, 25 bp, synthetic construct
  misc_feature 1..25: note = Oligonucleotide
  source 1..25: mol_type = other DNA
cggtcccagcctggccagcagcaac

SEQ ID NO: 28213 - DNA, 25 bp, synthetic construct
  misc_feature 1..25: note = Oligonucleotide
  source 1..25: mol_type = other DNA
ggacggtcccagcctggccagcagc

SEQ ID NO: 28214 - DNA, 25 bp, synthetic construct
  misc_feature 1..25: note = Oligonucleotide
  source 1..25: mol_type = other DNA
acaggacggtcccagcctggccagc

SEQ ID NO: 28215 - DNA, 25 bp, synthetic construct
  misc_feature 1..25: note = Oligonucleotide
  source 1..25: mol_type = other DNA
acaacaggacggtcccagcctggcc

SEQ ID NO: 28216 - DNA, 25 bp, synthetic construct
  misc_feature 1..25: note = Oligonucleotide
  source 1..25: mol_type = other DNA
gctacaacaggacggtcccagcctg

SEQ ID NO: 28217 - DNA, 25 bp, synthetic construct
  misc_feature 1..25: note = Oligonucleotide
  source 1..25: mol_type = other DNA
gcagctacaacaggacggtcccagc

SEQ ID NO: 28218 - DNA, 25 bp, synthetic construct
  misc_feature 1..25: note = Oligonucleotide
  source 1..25: mol_type = other DNA
ccagcagctacaacaggacggtccc

SEQ ID NO: 28219 - DNA, 25 bp, synthetic construct
  misc_feature 1..25: note = Oligonucleotide
  source 1..25: mol_type = other DNA
actccagcagctacaacaggacggt

SEQ ID NO: 28220 - DNA, 25 bp, synthetic construct
  misc_feature 1..25: note = Oligonucleotide
  source 1..25: mol_type = other DNA
gggactccagcagctacaacaggac

SEQ ID NO: 28221 - DNA, 25 bp, synthetic construct
  misc_feature 1..25: note = Oligonucleotide
  source 1..25: mol_type = other DNA
gaggggactccagcagctacaacag

SEQ ID NO: 28222 - DNA, 25 bp, synthetic construct
  misc_feature 1..25: note = Oligonucleotide
  source 1..25: mol_type = other DNA
ccagaggggactccagcagctacaa

SEQ ID NO: 28223 - DNA, 25 bp, synthetic construct
  misc_feature 1..25: note = Oligonucleotide
  source 1..25: mol_type = other DNA
ctcccagaggggactccagcagcta

SEQ ID NO: 28224 - DNA, 25 bp, synthetic construct
  misc_feature 1..25: note = Oligonucleotide
  source 1..25: mol_type = other DNA
actctcccagaggggactccagcag

SEQ ID NO: 28225 - DNA, 25 bp, synthetic construct
  misc_feature 1..25: note = Oligonucleotide
  source 1..25: mol_type = other DNA
acaactctcccagaggggactccag

SEQ ID NO: 28226 - DNA, 25 bp, synthetic construct
  misc_feature 1..25: note = Oligonucleotide
  source 1..25: mol_type = other DNA
gctacaactctcccagaggggactc

SEQ ID NO: 28227 - DNA, 25 bp, synthetic construct
  misc_feature 1..25: note = Oligonucleotide
  source 1..25: mol_type = other DNA
gcagctacaactctcccagagggga

SEQ ID NO: 28228 - DNA, 25 bp, synthetic construct
  misc_feature 1..25: note = Oligonucleotide
  source 1..25: mol_type = other DNA
ccggcagctacaactctcccagagg

SEQ ID NO: 28229 - DNA, 25 bp, synthetic construct
  misc_feature 1..25: note = Oligonucleotide
  source 1..25: mol_type = other DNA
actccggcagctacaactctcccag

SEQ ID NO: 28230 - DNA, 25 bp, synthetic construct
  misc_feature 1..25: note = Oligonucleotide
  source 1..25: mol_type = other DNA
gggactccggcagctacaactctcc

SEQ ID NO: 28231 - DNA, 25 bp, synthetic construct
  misc_feature 1..25: note = Oligonucleotide
  source 1..25: mol_type = other DNA
gaggggactccggcagctacaactc

SEQ ID NO: 28232 - DNA, 25 bp, synthetic construct
  misc_feature 1..25: note = Oligonucleotide
  source 1..25: mol_type = other DNA
ccagaggggactccggcagctacaa

SEQ ID NO: 28233 - DNA, 25 bp, synthetic construct
  misc_feature 1..25: note = Oligonucleotide
  source 1..25: mol_type = other DNA
ctcccagaggggactccggcagcta

SEQ ID NO: 28234 - DNA, 25 bp, synthetic construct
  misc_feature 1..25: note = Oligonucleotide
  source 1..25: mol_type = other DNA
actctcccagaggggactccggcag

SEQ ID NO: 28235 - DNA, 25 bp, synthetic construct
  misc_feature 1..25: note = Oligonucleotide
  source 1..25: mol_type = other DNA
gcaactctcccagaggggactccgg

SEQ ID NO: 28236 - DNA, 25 bp, synthetic construct
  misc_feature 1..25: note = Oligonucleotide
  source 1..25: mol_type = other DNA
gcagcaactctcccagaggggactc

SEQ ID NO: 28237 - DNA, 25 bp, synthetic construct
  misc_feature 1..25: note = Oligonucleotide
  source 1..25: mol_type = other DNA
ccagcagcaactctcccagagggga

SEQ ID NO: 28238 - DNA, 25 bp, synthetic construct
  misc_feature 1..25: note = Oligonucleotide
  source 1..25: mol_type = other DNA
tggccagcagcaactctcccagagg

SEQ ID NO: 28239 - DNA, 25 bp, synthetic construct
  misc_feature 1..25: note = Oligonucleotide
  source 1..25: mol_type = other DNA
gcctggccagcagcaactctcccag

SEQ ID NO: 28240 - DNA, 25 bp, synthetic construct
  misc_feature 1..25: note = Oligonucleotide
  source 1..25: mol_type = other DNA
ccagcctggccagcagcaactctcc

SEQ ID NO: 28241 - DNA, 25 bp, synthetic construct
  misc_feature 1..25: note = Oligonucleotide
  source 1..25: mol_type = other DNA
gtcccagcctggccagcagcaactc

SEQ ID NO: 28242 - DNA, 25 bp, synthetic construct
  misc_feature 1..25: note = Oligonucleotide
  source 1..25: mol_type = other DNA
acggtcccagcctggccagcagcaa

SEQ ID NO: 28243 - DNA, 25 bp, synthetic construct
  misc_feature 1..25: note = Oligonucleotide
  source 1..25: mol_type = other DNA
aggacggtcccagcctggccagcag

SEQ ID NO: 28244 - DNA, 25 bp, synthetic construct
  misc_feature 1..25: note = Oligonucleotide
  source 1..25: mol_type = other DNA
aacaggacggtcccagcctggccag

SEQ ID NO: 28245 - DNA, 25 bp, synthetic construct
  misc_feature 1..25: note = Oligonucleotide
  source 1..25: mol_type = other DNA
tacaacaggacggtcccagcctggc

SEQ ID NO: 28246 - DNA, 25 bp, synthetic construct
  misc_feature 1..25: note = Oligonucleotide
  source 1..25: mol_type = other DNA
agctacaacaggacggtcccagcct

SEQ ID NO: 28247 - DNA, 25 bp, synthetic construct
  misc_feature 1..25: note = Oligonucleotide
  source 1..25: mol_type = other DNA
ggcagctacaacaggacggtcccag

SEQ ID NO: 28248 - DNA, 25 bp, synthetic construct
  misc_feature 1..25: note = Oligonucleotide
  source 1..25: mol_type = other DNA
tccggcagctacaacaggacggtcc

SEQ ID NO: 28249 - DNA, 25 bp, synthetic construct
  misc_feature 1..25: note = Oligonucleotide
  source 1..25: mol_type = other DNA
gactccggcagctacaacaggacgg

SEQ ID NO: 28250 - DNA, 25 bp, synthetic construct
  misc_feature 1..25: note = Oligonucleotide
  source 1..25: mol_type = other DNA
ggggactccggcagctacaacagga

SEQ ID NO: 28251 - DNA, 25 bp, synthetic construct
  misc_feature 1..25: note = Oligonucleotide
  source 1..25: mol_type = other DNA
agaggggactccggcagctacaaca

SEQ ID NO: 28252 - DNA, 25 bp, synthetic construct
  misc_feature 1..25: note = Oligonucleotide
  source 1..25: mol_type = other DNA
cccagaggggactccggcagctaca

SEQ ID NO: 28253 - DNA, 25 bp, synthetic construct
  misc_feature 1..25: note = Oligonucleotide
  source 1..25: mol_type = other DNA
tctcccagaggggactccggcagct

SEQ ID NO: 28254 - DNA, 25 bp, synthetic construct
  misc_feature 1..25: note = Oligonucleotide
  source 1..25: mol_type = other DNA
aactctcccagaggggactccggca

SEQ ID NO: 28255 - DNA, 25 bp, synthetic construct
  misc_feature 1..25: note = Oligonucleotide
  source 1..25: mol_type = other DNA
agcaactctcccagaggggactccg

SEQ ID NO: 28256 - DNA, 25 bp, synthetic construct
  misc_feature 1..25: note = Oligonucleotide
  source 1..25: mol_type = other DNA
agcagcaactctcccagaggggact

SEQ ID NO: 28257 - DNA, 25 bp, synthetic construct
  misc_feature 1..25: note = Oligonucleotide
  source 1..25: mol_type = other DNA
gccagcagcaactctcccagagggg

SEQ ID NO: 28258 - DNA, 25 bp, synthetic construct
  misc_feature 1..25: note = Oligonucleotide
  source 1..25: mol_type = other DNA
ctggccagcagcaactctcccagag

SEQ ID NO: 28259 - DNA, 25 bp, synthetic construct
  misc_feature 1..25: note = Oligonucleotide
  source 1..25: mol_type = other DNA
agcctggccagcagcaactctccca

SEQ ID NO: 28260 - DNA, 25 bp, synthetic construct
  misc_feature 1..25: note = Oligonucleotide
  source 1..25: mol_type = other DNA
cccagcctggccagcagcaactctc

SEQ ID NO: 28261 - DNA, 25 bp, synthetic construct
  misc_feature 1..25: note = Oligonucleotide
  source 1..25: mol_type = other DNA
cgtcccagcctggccagcagcaact

SEQ ID NO: 28262 - DNA, 25 bp, synthetic construct
  misc_feature 1..25: note = Oligonucleotide
  source 1..25: mol_type = other DNA
gaccgtcccagcctggccagcagca

SEQ ID NO: 28263 - DNA, 25 bp, synthetic construct
  misc_feature 1..25: note = Oligonucleotide
  source 1..25: mol_type = other DNA
caggaccgtcccagcctggccagca

SEQ ID NO: 28264 - DNA, 25 bp, synthetic construct
  misc_feature 1..25: note = Oligonucleotide
  source 1..25: mol_type = other DNA
caacaggaccgtcccagcctggcca

SEQ ID NO: 28265 - DNA, 25 bp, synthetic construct
  misc_feature 1..25: note = Oligonucleotide
  source 1..25: mol_type = other DNA
ctacaacaggaccgtcccagcctgg

SEQ ID NO: 28266 - DNA, 25 bp, synthetic construct
  misc_feature 1..25: note = Oligonucleotide
  source 1..25: mol_type = other DNA
cagctacaacaggaccgtcccagcc

SEQ ID NO: 28267 - DNA, 25 bp, synthetic construct
  misc_feature 1..25: note = Oligonucleotide
  source 1..25: mol_type = other DNA
cggcagctacaacaggaccgtccca

SEQ ID NO: 28268 - DNA, 25 bp, synthetic construct
  misc_feature 1..25: note = Oligonucleotide
  source 1..25: mol_type = other DNA
ctccggcagctacaacaggaccgtc

SEQ ID NO: 28269 - DNA, 25 bp, synthetic construct
  misc_feature 1..25: note = Oligonucleotide
  source 1..25: mol_type = other DNA
ggactccggcagctacaacaggacc

SEQ ID NO: 28270 - DNA, 25 bp, synthetic construct
  misc_feature 1..25: note = Oligonucleotide
  source 1..25: mol_type = other DNA
aggggactccggcagctacaacagg

SEQ ID NO: 28271 - DNA, 25 bp, synthetic construct
  misc_feature 1..25: note = Oligonucleotide
  source 1..25: mol_type = other DNA
cagaggggactccggcagctacaac

SEQ ID NO: 28272 - DNA, 25 bp, synthetic construct
  misc_feature 1..25: note = Oligonucleotide
  source 1..25: mol_type = other DNA
tcccagaggggactccggcagctac

SEQ ID NO: 28273 - DNA, 25 bp, synthetic construct
  misc_feature 1..25: note = Oligonucleotide
  source 1..25: mol_type = other DNA
ctctcccagaggggactccggcagc

SEQ ID NO: 28274 - DNA, 25 bp, synthetic construct
  misc_feature 1..25: note = Oligonucleotide
  source 1..25: mol_type = other DNA
caactctcccagaggggactccggc

SEQ ID NO: 28275 - DNA, 25 bp, synthetic construct
  misc_feature 1..25: note = Oligonucleotide
  source 1..25: mol_type = other DNA
cagcaactctcccagaggggactcc

SEQ ID NO: 28276 - DNA, 25 bp, synthetic construct
  misc_feature 1..25: note = Oligonucleotide
  source 1..25: mol_type = other DNA
caacagcaactctcccagaggggac

SEQ ID NO: 28277 - DNA, 25 bp, synthetic construct
  misc_feature 1..25: note = Oligonucleotide
  source 1..25: mol_type = other DNA
ggccaacagcaactctcccagaggg

SEQ ID NO: 28278 - DNA, 25 bp, synthetic construct
  misc_feature 1..25: note = Oligonucleotide
  source 1..25: mol_type = other DNA
cctggccaacagcaactctcccaga

SEQ ID NO: 28279 - DNA, 25 bp, synthetic construct
  misc_feature 1..25: note = Oligonucleotide
  source 1..25: mol_type = other DNA
cagcctggccaacagcaactctccc

SEQ ID NO: 28280 - DNA, 25 bp, synthetic construct
  misc_feature 1..25: note = Oligonucleotide
  source 1..25: mol_type = other DNA
tcccagcctggccaacagcaactct

SEQ ID NO: 28281 - DNA, 25 bp, synthetic construct
  misc_feature 1..25: note = Oligonucleotide
  source 1..25: mol_type = other DNA
cggtcccagcctggccaacagcaac

SEQ ID NO: 28282 - DNA, 25 bp, synthetic construct
  misc_feature 1..25: note = Oligonucleotide
  source 1..25: mol_type = other DNA
ggacggtcccagcctggccaacagc

SEQ ID NO: 28283 - DNA, 25 bp, synthetic construct
  misc_feature 1..25: note = Oligonucleotide
  source 1..25: mol_type = other DNA
acaggacggtcccagcctggccaac

SEQ ID NO: 28284 - DNA, 25 bp, synthetic construct
  misc_feature 1..25: note = Oligonucleotide
  source 1..25: mol_type = other DNA
acaacaggacggtcccagcctggcc

SEQ ID NO: 28285 - DNA, 25 bp, synthetic construct
  misc_feature 1..25: note = Oligonucleotide
  source 1..25: mol_type = other DNA
gctacaacaggacggtcccagcctg

SEQ ID NO: 28286 - DNA, 25 bp, synthetic construct
  misc_feature 1..25: note = Oligonucleotide
  source 1..25: mol_type = other DNA
gcagctacaacaggacggtcccagc

SEQ ID NO: 28287 - DNA, 25 bp, synthetic construct
  misc_feature 1..25: note = Oligonucleotide
  source 1..25: mol_type = other DNA
ccggcagctacaacaggacggtccc

SEQ ID NO: 28288 - DNA, 25 bp, synthetic construct
  misc_feature 1..25: note = Oligonucleotide
  source 1..25: mol_type = other DNA
actccggcagctacaacaggacggt

SEQ ID NO: 28289 - DNA, 25 bp, synthetic construct
  misc_feature 1..25: note = Oligonucleotide
  source 1..25: mol_type = other DNA
gggactccggcagctacaacaggac

SEQ ID NO: 28290 - DNA, 25 bp, synthetic construct
  misc_feature 1..25: note = Oligonucleotide
  source 1..25: mol_type = other DNA
gaggggactccggcagctacaacag

SEQ ID NO: 28291 - DNA, 25 bp, synthetic construct
  misc_feature 1..25: note = Oligonucleotide
  source 1..25: mol_type = other DNA
ccagaggggactccggcagctacaa

SEQ ID NO: 28292 - DNA, 25 bp, synthetic construct
  misc_feature 1..25: note = Oligonucleotide
  source 1..25: mol_type = other DNA
ctcccagaggggactccggcagcta

SEQ ID NO: 28293 - DNA, 25 bp, synthetic construct
  misc_feature 1..25: note = Oligonucleotide
  source 1..25: mol_type = other DNA
actctcccagaggggactccggcag

SEQ ID NO: 28294 - DNA, 25 bp, synthetic construct
  misc_feature 1..25: note = Oligonucleotide
  source 1..25: mol_type = other DNA
acaactctcccagaggggactccgg

SEQ ID NO: 28295 - DNA, 25 bp, synthetic construct
  misc_feature 1..25: note = Oligonucleotide
  source 1..25: mol_type = other DNA
gctacaactctcccagaggggactc

SEQ ID NO: 28296 - DNA, 25 bp, synthetic construct
  misc_feature 1..25: note = Oligonucleotide
  source 1..25: mol_type = other DNA
gcagctacaactctcccagagggga

SEQ ID NO: 28297 - DNA, 25 bp, synthetic construct
  misc_feature 1..25: note = Oligonucleotide
  source 1..25: mol_type = other DNA
ccggcagctacaactctcccagagg

SEQ ID NO: 28298 - DNA, 25 bp, synthetic construct
  misc_feature 1..25: note = Oligonucleotide
  source 1..25: mol_type = other DNA
actccggcagctacaactctcccag

SEQ ID NO: 28299 - DNA, 25 bp, synthetic construct
  misc_feature 1..25: note = Oligonucleotide
  source 1..25: mol_type = other DNA
gggactccggcagctacaactctcc

SEQ ID NO: 28300 - DNA, 25 bp, synthetic construct
  misc_feature 1..25: note = Oligonucleotide
  source 1..25: mol_type = other DNA
gaggggactccggcagctacaactc

SEQ ID NO: 28301 - DNA, 25 bp, synthetic construct
  misc_feature 1..25: note = Oligonucleotide
  source 1..25: mol_type = other DNA
ccagaggggactccggcagctacaa

SEQ ID NO: 28302 - DNA, 25 bp, synthetic construct
  misc_feature 1..25: note = Oligonucleotide
  source 1..25: mol_type = other DNA
ctcccagaggggactccggcagcta

SEQ ID NO: 28303 - DNA, 25 bp, synthetic construct
  misc_feature 1..25: note = Oligonucleotide
  source 1..25: mol_type = other DNA
actctcccagaggggactccggcag

SEQ ID NO: 28304 - DNA, 25 bp, synthetic construct
  misc_feature 1..25: note = Oligonucleotide
  source 1..25: mol_type = other DNA
gcaactctcccagaggggactccgg

SEQ ID NO: 28305 - DNA, 25 bp, synthetic construct
  misc_feature 1..25: note = Oligonucleotide
  source 1..25: mol_type = other DNA
gcagcaactctcccagaggggactc

SEQ ID NO: 28306 - DNA, 25 bp, synthetic construct
  misc_feature 1..25: note = Oligonucleotide
  source 1..25: mol_type = other DNA
ccagcagcaactctcccagagggga

SEQ ID NO: 28307 - DNA, 25 bp, synthetic construct
  misc_feature 1..25: note = Oligonucleotide
  source 1..25: mol_type = other DNA
tggccagcagcaactctcccagagg

SEQ ID NO: 28308 - DNA, 25 bp, synthetic construct
  misc_feature 1..25: note = Oligonucleotide
  source 1..25: mol_type = other DNA
gcctggccagcagcaactctcccag

SEQ ID NO: 28309 - DNA, 25 bp, synthetic construct
  misc_feature 1..25: note = Oligonucleotide
  source 1..25: mol_type = other DNA
ccagcctggccagcagcaactctcc

SEQ ID NO: 28310 - DNA, 25 bp, synthetic construct
  misc_feature 1..25: note = Oligonucleotide
  source 1..25: mol_type = other DNA
gtcccagcctggccagcagcaactc

SEQ ID NO: 28311 - DNA, 25 bp, synthetic construct
  misc_feature 1..25: note = Oligonucleotide
  source 1..25: mol_type = other DNA
acggtcccagcctggccagcagcaa

SEQ ID NO: 28312 - DNA, 25 bp, synthetic construct
  misc_feature 1..25: note = Oligonucleotide
  source 1..25: mol_type = other DNA
aggacggtcccagcctggccagcag

SEQ ID NO: 28313 - DNA, 25 bp, synthetic construct
  misc_feature 1..25: note = Oligonucleotide
  source 1..25: mol_type = other DNA
aacaggacggtcccagcctggccag

SEQ ID NO: 28314 - DNA, 25 bp, synthetic construct
  misc_feature 1..25: note = Oligonucleotide
  source 1..25: mol_type = other DNA
tacaacaggacggtcccagcctggc

SEQ ID NO: 28315 - DNA, 25 bp, synthetic construct
  misc_feature 1..25: note = Oligonucleotide
  source 1..25: mol_type = other DNA
agctacaacaggacggtcccagcct

SEQ ID NO: 28316 - DNA, 25 bp, synthetic construct
  misc_feature 1..25: note = Oligonucleotide
  source 1..25: mol_type = other DNA
ggcagctacaacaggacggtcccag

SEQ ID NO: 28317 - DNA, 25 bp, synthetic construct
  misc_feature 1..25: note = Oligonucleotide
  source 1..25: mol_type = other DNA
tccggcagctacaacaggacggtcc

SEQ ID NO: 28318 - DNA, 25 bp, synthetic construct
  misc_feature 1..25: note = Oligonucleotide
  source 1..25: mol_type = other DNA
gactccggcagctacaacaggacgg

SEQ ID NO: 28319 - DNA, 25 bp, synthetic construct
  misc_feature 1..25: note = Oligonucleotide
  source 1..25: mol_type = other DNA
ggggactccggcagctacaacagga

SEQ ID NO: 28320 - DNA, 25 bp, synthetic construct
  misc_feature 1..25: note = Oligonucleotide
  source 1..25: mol_type = other DNA
agaggggactccggcagctacaaca

SEQ ID NO: 28321 - DNA, 25 bp, synthetic construct
  misc_feature 1..25: note = Oligonucleotide
  source 1..25: mol_type = other DNA
cccagaggggactccggcagctaca

SEQ ID NO: 28322 - DNA, 25 bp, synthetic construct
  misc_feature 1..25: note = Oligonucleotide
  source 1..25: mol_type = other DNA
tctcccagaggggactccggcagct

SEQ ID NO: 28323 - DNA, 25 bp, synthetic construct
  misc_feature 1..25: note = Oligonucleotide
  source 1..25: mol_type = other DNA
aactctcccagaggggactccggca

SEQ ID NO: 28324 - DNA, 25 bp, synthetic construct
  misc_feature 1..25: note = Oligonucleotide
  source 1..25: mol_type = other DNA
agcaactctcccagaggggactccg

SEQ ID NO: 28325 - DNA, 25 bp, synthetic construct
  misc_feature 1..25: note = Oligonucleotide
  source 1..25: mol_type = other DNA
agcagcaactctcccagaggggact

SEQ ID NO: 28326 - DNA, 25 bp, synthetic construct
  misc_feature 1..25: note = Oligonucleotide
  source 1..25: mol_type = other DNA
gccagcagcaactctcccagagggg

SEQ ID NO: 28327 - DNA, 25 bp, synthetic construct
  misc_feature 1..25: note = Oligonucleotide
  source 1..25: mol_type = other DNA
ctggccagcagcaactctcccagag

SEQ ID NO: 28328 - DNA, 25 bp, synthetic construct
  misc_feature 1..25: note = Oligonucleotide
  source 1..25: mol_type = other DNA
agcctggccagcagcaactctccca

SEQ ID NO: 28329 - DNA, 25 bp, synthetic construct
  misc_feature 1..25: note = Oligonucleotide
  source 1..25: mol_type = other DNA
cccagcctggccagcagcaactctc

SEQ ID NO: 28330 - DNA, 25 bp, synthetic construct
  misc_feature 1..25: note = Oligonucleotide
  source 1..25: mol_type = other DNA
ggtcccagcctggccagcagcaact

SEQ ID NO: 28331 - DNA, 25 bp, synthetic construct
  misc_feature 1..25: note = Oligonucleotide
  source 1..25: mol_type = other DNA
gatggtcccagcctggccagcagca

SEQ ID NO: 28332 - DNA, 25 bp, synthetic construct
  misc_feature 1..25: note = Oligonucleotide
  source 1..25: mol_type = other DNA
caggatggtcccagcctggccagca

SEQ ID NO: 28333 - DNA, 25 bp, synthetic construct
  misc_feature 1..25: note = Oligonucleotide
  source 1..25: mol_type = other DNA
caacaggatggtcccagcctggcca

SEQ ID NO: 28334 - DNA, 25 bp, synthetic construct
  misc_feature 1..25: note = Oligonucleotide
  source 1..25: mol_type = other DNA
ctacaacaggatggtcccagcctgg

SEQ ID NO: 28335 - DNA, 25 bp, synthetic construct
  misc_feature 1..25: note = Oligonucleotide
  source 1..25: mol_type = other DNA
cagctacaacaggatggtcccagcc

SEQ ID NO: 28336 - DNA, 25 bp, synthetic construct
  misc_feature 1..25: note = Oligonucleotide
  source 1..25: mol_type = other DNA
cggcagctacaacaggatggtccca

SEQ ID NO: 28337 - DNA, 25 bp, synthetic construct
  misc_feature 1..25: note = Oligonucleotide
  source 1..25: mol_type = other DNA
ctccggcagctacaacaggatggtc

SEQ ID NO: 28338 - DNA, 25 bp, synthetic construct
  misc_feature 1..25: note = Oligonucleotide
  source 1..25: mol_type = other DNA
ggactccggcagctacaacaggatg

SEQ ID NO: 28339 - DNA, 25 bp, synthetic construct
  misc_feature 1..25: note = Oligonucleotide
  source 1..25: mol_type = other DNA
aggggactccggcagctacaacagg

SEQ ID NO: 28340 - DNA, 25 bp, synthetic construct
  misc_feature 1..25: note = Oligonucleotide
  source 1..25: mol_type = other DNA
cagaggggactccggcagctacaac

SEQ ID NO: 28341 - DNA, 25 bp, synthetic construct
  misc_feature 1..25: note = Oligonucleotide
  source 1..25: mol_type = other DNA
tcccagaggggactccggcagctac

SEQ ID NO: 28342 - DNA, 25 bp, synthetic construct
  misc_feature 1..25: note = Oligonucleotide
  source 1..25: mol_type = other DNA
ctctcccagaggggactccggcagc

SEQ ID NO: 28343 - DNA, 25 bp, synthetic construct
  misc_feature 1..25: note = Oligonucleotide
  source 1..25: mol_type = other DNA
caactctcccagaggggactccggc

SEQ ID NO: 28344 - DNA, 25 bp, synthetic construct
  misc_feature 1..25: note = Oligonucleotide
  source 1..25: mol_type = other DNA
ctacaactctcccagaggggactcc

SEQ ID NO: 28345 - DNA, 25 bp, synthetic construct
  misc_feature 1..25: note = Oligonucleotide
  source 1..25: mol_type = other DNA
cagctacaactctcccagaggggac

SEQ ID NO: 28346 - DNA, 25 bp, synthetic construct
  misc_feature 1..25: note = Oligonucleotide
  source 1..25: mol_type = other DNA
ggccagctacaactctcccagaggg

SEQ ID NO: 28347 - DNA, 25 bp, synthetic construct
  misc_feature 1..25: note = Oligonucleotide
  source 1..25: mol_type = other DNA
cctggccagctacaactctcccaga

SEQ ID NO: 28348 - DNA, 25 bp, synthetic construct
  misc_feature 1..25: note = Oligonucleotide
  source 1..25: mol_type = other DNA
cagcctggccagctacaactctccc

SEQ ID NO: 28349 - DNA, 25 bp, synthetic construct
  misc_feature 1..25: note = Oligonucleotide
  source 1..25: mol_type = other DNA
tcccagcctggccagctacaactct

SEQ ID NO: 28350 - DNA, 25 bp, synthetic construct
  misc_feature 1..25: note = Oligonucleotide
  source 1..25: mol_type = other DNA
cggtcccagcctggccagctacaac

SEQ ID NO: 28351 - DNA, 25 bp, synthetic construct
  misc_feature 1..25: note = Oligonucleotide
  source 1..25: mol_type = other DNA
ggacggtcccagcctggccagctac

SEQ ID NO: 28352 - DNA, 25 bp, synthetic construct
  misc_feature 1..25: note = Oligonucleotide
  source 1..25: mol_type = other DNA
acaggacggtcccagcctggccagc

SEQ ID NO: 28353 - DNA, 25 bp, synthetic construct
  misc_feature 1..25: note = Oligonucleotide
  source 1..25: mol_type = other DNA
acaacaggacggtcccagcctggcc

SEQ ID NO: 28354 - DNA, 25 bp, synthetic construct
  misc_feature 1..25: note = Oligonucleotide
  source 1..25: mol_type = other DNA
gctacaacaggacggtcccagcctg

SEQ ID NO: 28355 - DNA, 25 bp, synthetic construct
  misc_feature 1..25: note = Oligonucleotide
  source 1..25: mol_type = other DNA
gcagctacaacaggacggtcccagc

SEQ ID NO: 28356 - DNA, 25 bp, synthetic construct
  misc_feature 1..25: note = Oligonucleotide
  source 1..25: mol_type = other DNA
ccggcagctacaacaggacggtccc

SEQ ID NO: 28357 - DNA, 25 bp, synthetic construct
  misc_feature 1..25: note = Oligonucleotide
  source 1..25: mol_type = other DNA
actccggcagctacaacaggacggt

SEQ ID NO: 28358 - DNA, 25 bp, synthetic construct
  misc_feature 1..25: note = Oligonucleotide
  source 1..25: mol_type = other DNA
gggactccggcagctacaacaggac

SEQ ID NO: 28359 - DNA, 25 bp, synthetic construct
  misc_feature 1..25: note = Oligonucleotide
  source 1..25: mol_type = other DNA
gaggggactccggcagctacaacag

SEQ ID NO: 28360 - DNA, 25 bp, synthetic construct
  misc_feature 1..25: note = Oligonucleotide
  source 1..25: mol_type = other DNA
ccagaggggactccggcagctacaa

SEQ ID NO: 28361 - DNA, 25 bp, synthetic construct
  misc_feature 1..25: note = Oligonucleotide
  source 1..25: mol_type = other DNA
ctcccagaggggactccggcagcta

SEQ ID NO: 28362 - DNA, 25 bp, synthetic construct
  misc_feature 1..25: note = Oligonucleotide
  source 1..25: mol_type = other DNA
actctcccagaggggactccggcag

SEQ ID NO: 28363 - DNA, 25 bp, synthetic construct
  misc_feature 1..25: note = Oligonucleotide
  source 1..25: mol_type = other DNA
gcaactctcccagaggggactccgg

SEQ ID NO: 28364 - DNA, 25 bp, synthetic construct
  misc_feature 1..25: note = Oligonucleotide
  source 1..25: mol_type = other DNA
gcagcaactctcccagaggggactc

SEQ ID NO: 28365 - DNA, 25 bp, synthetic construct
  misc_feature 1..25: note = Oligonucleotide
  source 1..25: mol_type = other DNA
ccagcagcaactctcccagagggga

SEQ ID NO: 28366 - DNA, 25 bp, synthetic construct
  misc_feature 1..25: note = Oligonucleotide
  source 1..25: mol_type = other DNA
tggccagcagcaactctcccagagg

SEQ ID NO: 28367 - DNA, 25 bp, synthetic construct
  misc_feature 1..25: note = Oligonucleotide
  source 1..25: mol_type = other DNA
gcctggccagcagcaactctcccag

SEQ ID NO: 28368 - DNA, 25 bp, synthetic construct
  misc_feature 1..25: note = Oligonucleotide
  source 1..25: mol_type = other DNA
ccagcctggccagcagcaactctcc

SEQ ID NO: 28369 - DNA, 25 bp, synthetic construct
  misc_feature 1..25: note = Oligonucleotide
  source 1..25: mol_type = other DNA
gtcccagcctggccagcagcaactc

SEQ ID NO: 28370 - DNA, 25 bp, synthetic construct
  misc_feature 1..25: note = Oligonucleotide
  source 1..25: mol_type = other DNA
acagtcccagcctggccagcagcaa

SEQ ID NO: 28371 - DNA, 25 bp, synthetic construct
  misc_feature 1..25: note = Oligonucleotide
  source 1..25: mol_type = other DNA
aggacagtcccagcctggccagcag

SEQ ID NO: 28372 - DNA, 25 bp, synthetic construct
  misc_feature 1..25: note = Oligonucleotide
  source 1..25: mol_type = other DNA
aacaggacagtcccagcctggccag

SEQ ID NO: 28373 - DNA, 25 bp, synthetic construct
  misc_feature 1..25: note = Oligonucleotide
  source 1..25: mol_type = other DNA
tacaacaggacagtcccagcctggc

SEQ ID NO: 28374 - DNA, 25 bp, synthetic construct
  misc_feature 1..25: note = Oligonucleotide
  source 1..25: mol_type = other DNA
agctacaacaggacagtcccagcct

SEQ ID NO: 28375 - DNA, 25 bp, synthetic construct
  misc_feature 1..25: note = Oligonucleotide
  source 1..25: mol_type = other DNA
ggcagctacaacaggacagtcccag

SEQ ID NO: 28376 - DNA, 25 bp, synthetic construct
  misc_feature 1..25: note = Oligonucleotide
  source 1..25: mol_type = other DNA
tccggcagctacaacaggacagtcc

SEQ ID NO: 28377 - DNA, 25 bp, synthetic construct
  misc_feature 1..25: note = Oligonucleotide
  source 1..25: mol_type = other DNA
gactccggcagctacaacaggacag

SEQ ID NO: 28378 - DNA, 25 bp, synthetic construct
  misc_feature 1..25: note = Oligonucleotide
  source 1..25: mol_type = other DNA
ggggactccggcagctacaacagga

SEQ ID NO: 28379 - DNA, 25 bp, synthetic construct
  misc_feature 1..25: note = Oligonucleotide
  source 1..25: mol_type = other DNA
agaggggactccggcagctacaaca

SEQ ID NO: 28380 - DNA, 25 bp, synthetic construct
  misc_feature 1..25: note = Oligonucleotide
  source 1..25: mol_type = other DNA
cccagaggggactccggcagctaca

SEQ ID NO: 28381 - DNA, 25 bp, synthetic construct
  misc_feature 1..25: note = Oligonucleotide
  source 1..25: mol_type = other DNA
tctcccagaggggactccggcagct

SEQ ID NO: 28382 - DNA, 25 bp, synthetic construct
  misc_feature 1..25: note = Oligonucleotide
  source 1..25: mol_type = other DNA
aactctcccagaggggactccggca

SEQ ID NO: 28383 - DNA, 25 bp, synthetic construct
  misc_feature 1..25: note = Oligonucleotide
  source 1..25: mol_type = other DNA
agcaactctcccagaggggactccg

SEQ ID NO: 28384 - DNA, 25 bp, synthetic construct
  misc_feature 1..25: note = Oligonucleotide
  source 1..25: mol_type = other DNA
agcagcaactctcccagaggggact

SEQ ID NO: 28385 - DNA, 25 bp, synthetic construct
  misc_feature 1..25: note = Oligonucleotide
  source 1..25: mol_type = other DNA
gccagcagcaactctcccagagggg

SEQ ID NO: 28386 - DNA, 25 bp, synthetic construct
  misc_feature 1..25: note = Oligonucleotide
  source 1..25: mol_type = other DNA
ctggccagcagcaactctcccagag

SEQ ID NO: 28387 - DNA, 25 bp, synthetic construct
  misc_feature 1..25: note = Oligonucleotide
  source 1..25: mol_type = other DNA
agcctggccagcagcaactctccca

SEQ ID NO: 28388 - DNA, 25 bp, synthetic construct
  misc_feature 1..25: note = Oligonucleotide
  source 1..25: mol_type = other DNA
cccagcctggccagcagcaactctc

SEQ ID NO: 28389 - DNA, 25 bp, synthetic construct
  misc_feature 1..25: note = Oligonucleotide
  source 1..25: mol_type = other DNA
ggtcccagcctggccagcagcaact

SEQ ID NO: 28390 - DNA, 25 bp, synthetic construct
  misc_feature 1..25: note = Oligonucleotide
  source 1..25: mol_type = other DNA
gacggtcccagcctggccagcagca

SEQ ID NO: 28391 - DNA, 25 bp, synthetic construct
  misc_feature 1..25: note = Oligonucleotide
  source 1..25: mol_type = other DNA
caggacggtcccagcctggccagca

SEQ ID NO: 28392 - DNA, 25 bp, synthetic construct
  misc_feature 1..25: note = Oligonucleotide
  source 1..25: mol_type = other DNA
caacaggacggtcccagcctggcca

SEQ ID NO: 28393 - DNA, 25 bp, synthetic construct
  misc_feature 1..25: note = Oligonucleotide
  source 1..25: mol_type = other DNA
ctacaacaggacggtcccagcctgg

SEQ ID NO: 28394 - DNA, 25 bp, synthetic construct
  misc_feature 1..25: note = Oligonucleotide
  source 1..25: mol_type = other DNA
cagctacaacaggacggtcccagcc

SEQ ID NO: 28395 - DNA, 25 bp, synthetic construct
  misc_feature 1..25: note = Oligonucleotide
  source 1..25: mol_type = other DNA
cggcagctacaacaggacggtccca

SEQ ID NO: 28396 - DNA, 25 bp, synthetic construct
  misc_feature 1..25: note = Oligonucleotide
  source 1..25: mol_type = other DNA
ctccggcagctacaacaggacggtc

SEQ ID NO: 28397 - DNA, 25 bp, synthetic construct
  misc_feature 1..25: note = Oligonucleotide
  source 1..25: mol_type = other DNA
ggactccggcagctacaacaggacg

SEQ ID NO: 28398 - DNA, 25 bp, synthetic construct
  misc_feature 1..25: note = Oligonucleotide
  source 1..25: mol_type = other DNA
aggggactccggcagctacaacagg

SEQ ID NO: 28399 - DNA, 25 bp, synthetic construct
  misc_feature 1..25: note = Oligonucleotide
  source 1..25: mol_type = other DNA
cagaggggactccggcagctacaac

SEQ ID NO: 28400 - DNA, 25 bp, synthetic construct
  misc_feature 1..25: note = Oligonucleotide
  source 1..25: mol_type = other DNA
tcccagaggggactccggcagctac

SEQ ID NO: 28401 - DNA, 25 bp, synthetic construct
  misc_feature 1..25: note = Oligonucleotide
  source 1..25: mol_type = other DNA
ctctcccagaggggactccggcagc

SEQ ID NO: 28402 - DNA, 25 bp, synthetic construct
  misc_feature 1..25: note = Oligonucleotide
  source 1..25: mol_type = other DNA
caactctcccagaggggactccggc

SEQ ID NO: 28403 - DNA, 25 bp, synthetic construct
  misc_feature 1..25: note = Oligonucleotide
  source 1..25: mol_type = other DNA
cagcaactctcccagaggggactcc

SEQ ID NO: 28404 - DNA, 25 bp, synthetic construct
  misc_feature 1..25: note = Oligonucleotide
  source 1..25: mol_type = other DNA
cagcagcaactctcccagaggggac

SEQ ID NO: 28405 - DNA, 25 bp, synthetic construct
  misc_feature 1..25: note = Oligonucleotide
  source 1..25: mol_type = other DNA
ggccagcagcaactctcccagaggg

SEQ ID NO: 28406 - DNA, 25 bp, synthetic construct
  misc_feature 1..25: note = Oligonucleotide
  source 1..25: mol_type = other DNA
cctggccagcagcaactctcccaga

SEQ ID NO: 28407 - DNA, 25 bp, synthetic construct
  misc_feature 1..25: note = Oligonucleotide
  source 1..25: mol_type = other DNA
cagcctggccagcagcaactctccc

SEQ ID NO: 28408 - DNA, 25 bp, synthetic construct
  misc_feature 1..25: note = Oligonucleotide
  source 1..25: mol_type = other DNA
tcccagcctggccagcagcaactct

SEQ ID NO: 28409 - DNA, 25 bp, synthetic construct
  misc_feature 1..25: note = Oligonucleotide
  source 1..25: mol_type = other DNA
cagtcccagcctggccagcagcaac

SEQ ID NO: 28410 - DNA, 25 bp, synthetic construct
  misc_feature 1..25: note = Oligonucleotide
  source 1..25: mol_type = other DNA
ggacagtcccagcctggccagcagc

SEQ ID NO: 28411 - DNA, 25 bp, synthetic construct
  misc_feature 1..25: note = Oligonucleotide
  source 1..25: mol_type = other DNA
acaggacagtcccagcctggccagc

SEQ ID NO: 28412 - DNA, 25 bp, synthetic construct
  misc_feature 1..25: note = Oligonucleotide
  source 1..25: mol_type = other DNA
acaacaggacagtcccagcctggcc

SEQ ID NO: 28413 - DNA, 25 bp, synthetic construct
  misc_feature 1..25: note = Oligonucleotide
  source 1..25: mol_type = other DNA
gctacaacaggacagtcccagcctg

SEQ ID NO: 28414 - DNA, 25 bp, synthetic construct
  misc_feature 1..25: note = Oligonucleotide
  source 1..25: mol_type = other DNA
gcagctacaacaggacagtcccagc

SEQ ID NO: 28415 - DNA, 25 bp, synthetic construct
  misc_feature 1..25: note = Oligonucleotide
  source 1..25: mol_type = other DNA
ccggcagctacaacaggacagtccc

SEQ ID NO: 28416 - DNA, 25 bp, synthetic construct
  misc_feature 1..25: note = Oligonucleotide
  source 1..25: mol_type = other DNA
actccggcagctacaacaggacagt

SEQ ID NO: 28417 - DNA, 25 bp, synthetic construct
  misc_feature 1..25: note = Oligonucleotide
  source 1..25: mol_type = other DNA
gggactccggcagctacaacaggac

SEQ ID NO: 28418 - DNA, 25 bp, synthetic construct
  misc_feature 1..25: note = Oligonucleotide
  source 1..25: mol_type = other DNA
gaggggactccggcagctacaacag

SEQ ID NO: 28419 - DNA, 25 bp, synthetic construct
  misc_feature 1..25: note = Oligonucleotide
  source 1..25: mol_type = other DNA
ccagaggggactccggcagctacaa

SEQ ID NO: 28420 - DNA, 25 bp, synthetic construct
  misc_feature 1..25: note = Oligonucleotide
  source 1..25: mol_type = other DNA
ctcccagaggggactccggcagcta

SEQ ID NO: 28421 - DNA, 25 bp, synthetic construct
  misc_feature 1..25: note = Oligonucleotide
  source 1..25: mol_type = other DNA
actctcccagaggggactccggcag

SEQ ID NO: 28422 - DNA, 25 bp, synthetic construct
  misc_feature 1..25: note = Oligonucleotide
  source 1..25: mol_type = other DNA
acaactctcccagaggggactccgg

SEQ ID NO: 28423 - DNA, 25 bp, synthetic construct
  misc_feature 1..25: note = Oligonucleotide
  source 1..25: mol_type = other DNA
gctacaactctcccagaggggactc

SEQ ID NO: 28424 - DNA, 25 bp, synthetic construct
  misc_feature 1..25: note = Oligonucleotide
  source 1..25: mol_type = other DNA
gcagctacaactctcccagagggga

SEQ ID NO: 28425 - DNA, 25 bp, synthetic construct
  misc_feature 1..25: note = Oligonucleotide
  source 1..25: mol_type = other DNA
ccggcagctacaactctcccagagg

SEQ ID NO: 28426 - DNA, 25 bp, synthetic construct
  misc_feature 1..25: note = Oligonucleotide
  source 1..25: mol_type = other DNA
actccggcagctacaactctcccag

SEQ ID NO: 28427 - DNA, 25 bp, synthetic construct
  misc_feature 1..25: note = Oligonucleotide
  source 1..25: mol_type = other DNA
gggactccggcagctacaactctcc

SEQ ID NO: 28428 - DNA, 25 bp, synthetic construct
  misc_feature 1..25: note = Oligonucleotide
  source 1..25: mol_type = other DNA
gaggggactccggcagctacaactc

SEQ ID NO: 28429 - DNA, 25 bp, synthetic construct
  misc_feature 1..25: note = Oligonucleotide
  source 1..25: mol_type = other DNA
ccagaggggactccggcagctacaa

SEQ ID NO: 28430 - DNA, 25 bp, synthetic construct
  misc_feature 1..25: note = Oligonucleotide
  source 1..25: mol_type = other DNA
ctcccagaggggactccggcagcta

SEQ ID NO: 28431 - DNA, 25 bp, synthetic construct
  misc_feature 1..25: note = Oligonucleotide
  source 1..25: mol_type = other DNA
actctcccagaggggactccggcag

SEQ ID NO: 28432 - DNA, 25 bp, synthetic construct
  misc_feature 1..25: note = Oligonucleotide
  source 1..25: mol_type = other DNA
gcaactctcccagaggggactccgg

SEQ ID NO: 28433 - DNA, 25 bp, synthetic construct
  misc_feature 1..25: note = Oligonucleotide
  source 1..25: mol_type = other DNA
gcagcaactctcccagaggggactc

SEQ ID NO: 28434 - DNA, 25 bp, synthetic construct
  misc_feature 1..25: note = Oligonucleotide
  source 1..25: mol_type = other DNA
ccagcagcaactctcccagagggga

SEQ ID NO: 28435 - DNA, 25 bp, synthetic construct
  misc_feature 1..25: note = Oligonucleotide
  source 1..25: mol_type = other DNA
tggccagcagcaactctcccagagg

SEQ ID NO: 28436 - DNA, 25 bp, synthetic construct
  misc_feature 1..25: note = Oligonucleotide
  source 1..25: mol_type = other DNA
gcctggccagcagcaactctcccag

SEQ ID NO: 28437 - DNA, 25 bp, synthetic construct
  misc_feature 1..25: note = Oligonucleotide
  source 1..25: mol_type = other DNA
ccagcctggccagcagcaactctcc

SEQ ID NO: 28438 - DNA, 25 bp, synthetic construct
  misc_feature 1..25: note = Oligonucleotide
  source 1..25: mol_type = other DNA
gtcccagcctggccagcagcaactc

SEQ ID NO: 28439 - DNA, 25 bp, synthetic construct
  misc_feature 1..25: note = Oligonucleotide
  source 1..25: mol_type = other DNA
accgtcccagcctggccagcagcaa

SEQ ID NO: 28440 - DNA, 25 bp, synthetic construct
  misc_feature 1..25: note = Oligonucleotide
  source 1..25: mol_type = other DNA
aggaccgtcccagcctggccagcag

SEQ ID NO: 28441 - DNA, 25 bp, synthetic construct
  misc_feature 1..25: note = Oligonucleotide
  source 1..25: mol_type = other DNA
aacaggaccgtcccagcctggccag

SEQ ID NO: 28442 - DNA, 25 bp, synthetic construct
  misc_feature 1..25: note = Oligonucleotide
  source 1..25: mol_type = other DNA
tacaacaggaccgtcccagcctggc

SEQ ID NO: 28443 - DNA, 25 bp, synthetic construct
  misc_feature 1..25: note = Oligonucleotide
  source 1..25: mol_type = other DNA
agctacaacaggaccgtcccagcct

SEQ ID NO: 28444 - DNA, 25 bp, synthetic construct
  misc_feature 1..25: note = Oligonucleotide
  source 1..25: mol_type = other DNA
ggcagctacaacaggaccgtcccag

SEQ ID NO: 28445 - DNA, 25 bp, synthetic construct
  misc_feature 1..25: note = Oligonucleotide
  source 1..25: mol_type = other DNA
tccggcagctacaacaggaccgtcc

SEQ ID NO: 28446 - DNA, 25 bp, synthetic construct
  misc_feature 1..25: note = Oligonucleotide
  source 1..25: mol_type = other DNA
gactccggcagctacaacaggaccg

SEQ ID NO: 28447 - DNA, 25 bp, synthetic construct
  misc_feature 1..25: note = Oligonucleotide
  source 1..25: mol_type = other DNA
ggggactccggcagctacaacagga

SEQ ID NO: 28448 - DNA, 25 bp, synthetic construct
  misc_feature 1..25: note = Oligonucleotide
  source 1..25: mol_type = other DNA
agaggggactccggcagctacaaca

SEQ ID NO: 28449 - DNA, 25 bp, synthetic construct
  misc_feature 1..25: note = Oligonucleotide
  source 1..25: mol_type = other DNA
cccagaggggactccggcagctaca

SEQ ID NO: 28450 - DNA, 25 bp, synthetic construct
  misc_feature 1..25: note = Oligonucleotide
  source 1..25: mol_type = other DNA
tctcccagaggggactccggcagct

SEQ ID NO: 28451 - DNA, 25 bp, synthetic construct
  misc_feature 1..25: note = Oligonucleotide
  source 1..25: mol_type = other DNA
aactctcccagaggggactccggca

SEQ ID NO: 28452 - DNA, 25 bp, synthetic construct
  misc_feature 1..25: note = Oligonucleotide
  source 1..25: mol_type = other DNA
agcaactctcccagaggggactccg

SEQ ID NO: 28453 - DNA, 25 bp, synthetic construct
  misc_feature 1..25: note = Oligonucleotide
  source 1..25: mol_type = other DNA
agcagcaactctcccagaggggact

SEQ ID NO: 28454 - DNA, 25 bp, synthetic construct
  misc_feature 1..25: note = Oligonucleotide
  source 1..25: mol_type = other DNA
gccagcagcaactctcccagagggg

SEQ ID NO: 28455 - DNA, 25 bp, synthetic construct
  misc_feature 1..25: note = Oligonucleotide
  source 1..25: mol_type = other DNA
ctggccagcagcaactctcccagag

SEQ ID NO: 28456 - DNA, 25 bp, synthetic construct
  misc_feature 1..25: note = Oligonucleotide
  source 1..25: mol_type = other DNA
agcctggccagcagcaactctccca

SEQ ID NO: 28457 - DNA, 25 bp, synthetic construct
  misc_feature 1..25: note = Oligonucleotide
  source 1..25: mol_type = other DNA
cccagcctggccagcagcaactctc

SEQ ID NO: 28458 - DNA, 25 bp, synthetic construct
  misc_feature 1..25: note = Oligonucleotide
  source 1..25: mol_type = other DNA
cgtcccagcctggccagcagcaact

SEQ ID NO: 28459 - DNA, 25 bp, synthetic construct
  misc_feature 1..25: note = Oligonucleotide
  source 1..25: mol_type = other DNA
gaccgtcccagcctggccagcagca

SEQ ID NO: 28460 - DNA, 25 bp, synthetic construct
  misc_feature 1..25: note = Oligonucleotide
  source 1..25: mol_type = other DNA
caggaccgtcccagcctggccagca

SEQ ID NO: 28461 - DNA, 25 bp, synthetic construct
  misc_feature 1..25: note = Oligonucleotide
  source 1..25: mol_type = other DNA
caacaggaccgtcccagcctggcca

SEQ ID NO: 28462 - DNA, 25 bp, synthetic construct
  misc_feature 1..25: note = Oligonucleotide
  source 1..25: mol_type = other DNA
ctacaacaggaccgtcccagcctgg

SEQ ID NO: 28463 - DNA, 25 bp, synthetic construct
  misc_feature 1..25: note = Oligonucleotide
  source 1..25: mol_type = other DNA
cagctacaacaggaccgtcccagcc

SEQ ID NO: 28464 - DNA, 25 bp, synthetic construct
  misc_feature 1..25: note = Oligonucleotide
  source 1..25: mol_type = other DNA
cggcagctacaacaggaccgtccca

SEQ ID NO: 28465 - DNA, 25 bp, synthetic construct
  misc_feature 1..25: note = Oligonucleotide
  source 1..25: mol_type = other DNA
ctccggcagctacaacaggaccgtc

SEQ ID NO: 28466 - DNA, 25 bp, synthetic construct
  misc_feature 1..25: note = Oligonucleotide
  source 1..25: mol_type = other DNA
ggactccggcagctacaacaggacc

SEQ ID NO: 28467 - DNA, 25 bp, synthetic construct
  misc_feature 1..25: note = Oligonucleotide
  source 1..25: mol_type = other DNA
aggggactccggcagctacaacagg

SEQ ID NO: 28468 - DNA, 25 bp, synthetic construct
  misc_feature 1..25: note = Oligonucleotide
  source 1..25: mol_type = other DNA
cagaggggactccggcagctacaac

SEQ ID NO: 28469 - DNA, 25 bp, synthetic construct
  misc_feature 1..25: note = Oligonucleotide
  source 1..25: mol_type = other DNA
tcccagaggggactccggcagctac

SEQ ID NO: 28470 - DNA, 25 bp, synthetic construct
  misc_feature 1..25: note = Oligonucleotide
  source 1..25: mol_type = other DNA
ctctcccagaggggactccggcagc

SEQ ID NO: 28471 - DNA, 25 bp, synthetic construct
  misc_feature 1..25: note = Oligonucleotide
  source 1..25: mol_type = other DNA
caactctcccagaggggactccggc

SEQ ID NO: 28472 - DNA, 25 bp, synthetic construct
  misc_feature 1..25: note = Oligonucleotide
  source 1..25: mol_type = other DNA
ctacaactctcccagaggggactcc

SEQ ID NO: 28473 - DNA, 25 bp, synthetic construct
  misc_feature 1..25: note = Oligonucleotide
  source 1..25: mol_type = other DNA
cagctacaactctcccagaggggac

SEQ ID NO: 28474 - DNA, 25 bp, synthetic construct
  misc_feature 1..25: note = Oligonucleotide
  source 1..25: mol_type = other DNA
ggccagctacaactctcccagaggg

SEQ ID NO: 28475 - DNA, 25 bp, synthetic construct
  misc_feature 1..25: note = Oligonucleotide
  source 1..25: mol_type = other DNA
cctggccagctacaactctcccaga

SEQ ID NO: 28476 - DNA, 25 bp, synthetic construct
  misc_feature 1..25: note = Oligonucleotide
  source 1..25: mol_type = other DNA
cagcctggccagctacaactctccc

SEQ ID NO: 28477 - DNA, 25 bp, synthetic construct
  misc_feature 1..25: note = Oligonucleotide
  source 1..25: mol_type = other DNA
tcccagcctggccagctacaactct

SEQ ID NO: 28478 - DNA, 25 bp, synthetic construct
  misc_feature 1..25: note = Oligonucleotide
  source 1..25: mol_type = other DNA
cggtcccagcctggccagctacaac

SEQ ID NO: 28479 - DNA, 25 bp, synthetic construct
  misc_feature 1..25: note = Oligonucleotide
  source 1..25: mol_type = other DNA
ggacggtcccagcctggccagctac

SEQ ID NO: 28480 - DNA, 25 bp, synthetic construct
  misc_feature 1..25: note = Oligonucleotide
  source 1..25: mol_type = other DNA
acaggacggtcccagcctggccagc

SEQ ID NO: 28481 - DNA, 25 bp, synthetic construct
  misc_feature 1..25: note = Oligonucleotide
  source 1..25: mol_type = other DNA
acaacaggacggtcccagcctggcc

SEQ ID NO: 28482 - DNA, 25 bp, synthetic construct
  misc_feature 1..25: note = Oligonucleotide
  source 1..25: mol_type = other DNA
gctacaacaggacggtcccagcctg

SEQ ID NO: 28483 - DNA, 25 bp, synthetic construct
  misc_feature 1..25: note = Oligonucleotide
  source 1..25: mol_type = other DNA
gcagctacaacaggacggtcccagc

SEQ ID NO: 28484 - DNA, 25 bp, synthetic construct
  misc_feature 1..25: note = Oligonucleotide
  source 1..25: mol_type = other DNA
ccggcagctacaacaggacggtccc

SEQ ID NO: 28485 - DNA, 25 bp, synthetic construct
  misc_feature 1..25: note = Oligonucleotide
  source 1..25: mol_type = other DNA
actccggcagctacaacaggacggt

SEQ ID NO: 28486 - DNA, 25 bp, synthetic construct
  misc_feature 1..25: note = Oligonucleotide
  source 1..25: mol_type = other DNA
gggactccggcagctacaacaggac

SEQ ID NO: 28487 - DNA, 25 bp, synthetic construct
  misc_feature 1..25: note = Oligonucleotide
  source 1..25: mol_type = other DNA
gaggggactccggcagctacaacag

SEQ ID NO: 28488 - DNA, 25 bp, synthetic construct
  misc_feature 1..25: note = Oligonucleotide
  source 1..25: mol_type = other DNA
ccagaggggactccggcagctacaa

SEQ ID NO: 28489 - DNA, 25 bp, synthetic construct
  misc_feature 1..25: note = Oligonucleotide
  source 1..25: mol_type = other DNA
ctcccagaggggactccggcagcta

SEQ ID NO: 28490 - DNA, 25 bp, synthetic construct
  misc_feature 1..25: note = Oligonucleotide
  source 1..25: mol_type = other DNA
actctcccagaggggactccggcag

SEQ ID NO: 28491 - DNA, 25 bp, synthetic construct
  misc_feature 1..25: note = Oligonucleotide
  source 1..25: mol_type = other DNA
gcaactctcccagaggggactccgg

SEQ ID NO: 28492 - DNA, 25 bp, synthetic construct
  misc_feature 1..25: note = Oligonucleotide
  source 1..25: mol_type = other DNA
gcagcaactctcccagaggggactc

SEQ ID NO: 28493 - DNA, 25 bp, synthetic construct
  misc_feature 1..25: note = Oligonucleotide
  source 1..25: mol_type = other DNA
ccagcagcaactctcccagagggga

SEQ ID NO: 28494 - DNA, 25 bp, synthetic construct
  misc_feature 1..25: note = Oligonucleotide
  source 1..25: mol_type = other DNA
tggccagcagcaactctcccagagg

SEQ ID NO: 28495 - DNA, 25 bp, synthetic construct
  misc_feature 1..25: note = Oligonucleotide
  source 1..25: mol_type = other DNA
gcctggccagcagcaactctcccag

SEQ ID NO: 28496 - DNA, 25 bp, synthetic construct
  misc_feature 1..25: note = Oligonucleotide
  source 1..25: mol_type = other DNA
ccagcctggccagcagcaactctcc

SEQ ID NO: 28497 - DNA, 25 bp, synthetic construct
  misc_feature 1..25: note = Oligonucleotide
  source 1..25: mol_type = other DNA
gtcccagcctggccagcagcaactc

SEQ ID NO: 28498 - DNA, 25 bp, synthetic construct
  misc_feature 1..25: note = Oligonucleotide
  source 1..25: mol_type = other DNA
acggtcccagcctggccagcagcaa

SEQ ID NO: 28499 - DNA, 25 bp, synthetic construct
  misc_feature 1..25: note = Oligonucleotide
  source 1..25: mol_type = other DNA
aggacggtcccagcctggccagcag

SEQ ID NO: 28500 - DNA, 25 bp, synthetic construct
  misc_feature 1..25: note = Oligonucleotide
  source 1..25: mol_type = other DNA
aacaggacggtcccagcctggccag

SEQ ID NO: 28501 - DNA, 25 bp, synthetic construct
  misc_feature 1..25: note = Oligonucleotide
  source 1..25: mol_type = other DNA
tacaacaggacggtcccagcctggc

SEQ ID NO: 28502 - DNA, 25 bp, synthetic construct
  misc_feature 1..25: note = Oligonucleotide
  source 1..25: mol_type = other DNA
agctacaacaggacggtcccagcct

SEQ ID NO: 28503 - DNA, 25 bp, synthetic construct
  misc_feature 1..25: note = Oligonucleotide
  source 1..25: mol_type = other DNA
ggcagctacaacaggacggtcccag

SEQ ID NO: 28504 - DNA, 25 bp, synthetic construct
  misc_feature 1..25: note = Oligonucleotide
  source 1..25: mol_type = other DNA
tccggcagctacaacaggacggtcc

SEQ ID NO: 28505 - DNA, 25 bp, synthetic construct
  misc_feature 1..25: note = Oligonucleotide
  source 1..25: mol_type = other DNA
gactccggcagctacaacaggacgg

SEQ ID NO: 28506 - DNA, 25 bp, synthetic construct
  misc_feature 1..25: note = Oligonucleotide
  source 1..25: mol_type = other DNA
ggggactccggcagctacaacagga

SEQ ID NO: 28507 - DNA, 25 bp, synthetic construct
  misc_feature 1..25: note = Oligonucleotide
  source 1..25: mol_type = other DNA
agaggggactccggcagctacaaca

SEQ ID NO: 28508 - DNA, 25 bp, synthetic construct
  misc_feature 1..25: note = Oligonucleotide
  source 1..25: mol_type = other DNA
cccagaggggactccggcagctaca

SEQ ID NO: 28509 - DNA, 25 bp, synthetic construct
  misc_feature 1..25: note = Oligonucleotide
  source 1..25: mol_type = other DNA
tctcccagaggggactccggcagct

SEQ ID NO: 28510 - DNA, 25 bp, synthetic construct
  misc_feature 1..25: note = Oligonucleotide
  source 1..25: mol_type = other DNA
aactctcccagaggggactccggca

SEQ ID NO: 28511 - DNA, 25 bp, synthetic construct
  misc_feature 1..25: note = Oligonucleotide
  source 1..25: mol_type = other DNA
tacaactctcccagaggggactccg

SEQ ID NO: 28512 - DNA, 25 bp, synthetic construct
  misc_feature 1..25: note = Oligonucleotide
  source 1..25: mol_type = other DNA
agctacaactctcccagaggggact

SEQ ID NO: 28513 - DNA, 25 bp, synthetic construct
  misc_feature 1..25: note = Oligonucleotide
  source 1..25: mol_type = other DNA
ggcagctacaactctcccagagggg

SEQ ID NO: 28514 - DNA, 25 bp, synthetic construct
  misc_feature 1..25: note = Oligonucleotide
  source 1..25: mol_type = other DNA
tccggcagctacaactctcccagag

SEQ ID NO: 28515 - DNA, 25 bp, synthetic construct
  misc_feature 1..25: note = Oligonucleotide
  source 1..25: mol_type = other DNA
gactccggcagctacaactctccca

SEQ ID NO: 28516 - DNA, 25 bp, synthetic construct
  misc_feature 1..25: note = Oligonucleotide
  source 1..25: mol_type = other DNA
ggggactccggcagctacaactctc

SEQ ID NO: 28517 - DNA, 25 bp, synthetic construct
  misc_feature 1..25: note = Oligonucleotide
  source 1..25: mol_type = other DNA
agaggggactccggcagctacaact

SEQ ID NO: 28518 - DNA, 25 bp, synthetic construct
  misc_feature 1..25: note = Oligonucleotide
  source 1..25: mol_type = other DNA
cccagaggggactccggcagctaca

SEQ ID NO: 28519 - DNA, 25 bp, synthetic construct
  misc_feature 1..25: note = Oligonucleotide
  source 1..25: mol_type = other DNA
tctcccagaggggactccggcagct

SEQ ID NO: 28520 - DNA, 25 bp, synthetic construct
  misc_feature 1..25: note = Oligonucleotide
  source 1..25: mol_type = other DNA
aactctcccagaggggactccggca

SEQ ID NO: 28521 - DNA, 25 bp, synthetic construct
  misc_feature 1..25: note = Oligonucleotide
  source 1..25: mol_type = other DNA
agcaactctcccagaggggactccg

SEQ ID NO: 28522 - DNA, 25 bp, synthetic construct
  misc_feature 1..25: note = Oligonucleotide
  source 1..25: mol_type = other DNA
agcagcaactctcccagaggggact

SEQ ID NO: 28523 - DNA, 25 bp, synthetic construct
  misc_feature 1..25: note = Oligonucleotide
  source 1..25: mol_type = other DNA
gccagcagcaactctcccagagggg

SEQ ID NO: 28524 - DNA, 25 bp, synthetic construct
  misc_feature 1..25: note = Oligonucleotide
  source 1..25: mol_type = other DNA
ctggccagcagcaactctcccagag

SEQ ID NO: 28525 - DNA, 25 bp, synthetic construct
  misc_feature 1..25: note = Oligonucleotide
  source 1..25: mol_type = other DNA
agcctggccagcagcaactctccca

SEQ ID NO: 28526 - DNA, 25 bp, synthetic construct
  misc_feature 1..25: note = Oligonucleotide
  source 1..25: mol_type = other DNA
cccagcctggccagcagcaactctc

SEQ ID NO: 28527 - DNA, 25 bp, synthetic construct
  misc_feature 1..25: note = Oligonucleotide
  source 1..25: mol_type = other DNA
ggtcccagcctggccagcagcaact

SEQ ID NO: 28528 - DNA, 25 bp, synthetic construct
  misc_feature 1..25: note = Oligonucleotide
  source 1..25: mol_type = other DNA
gacggtcccagcctggccagcagca

SEQ ID NO: 28529 - DNA, 25 bp, synthetic construct
  misc_feature 1..25: note = Oligonucleotide
  source 1..25: mol_type = other DNA
caggacggtcccagcctggccagca

SEQ ID NO: 28530 - DNA, 25 bp, synthetic construct
  misc_feature 1..25: note = Oligonucleotide
  source 1..25: mol_type = other DNA
caacaggacggtcccagcctggcca

SEQ ID NO: 28531 - DNA, 25 bp, synthetic construct
  misc_feature 1..25: note = Oligonucleotide
  source 1..25: mol_type = other DNA
ctacaacaggacggtcccagcctgg

SEQ ID NO: 28532 - DNA, 25 bp, synthetic construct
  misc_feature 1..25: note = Oligonucleotide
  source 1..25: mol_type = other DNA
cagctacaacaggacggtcccagcc

SEQ ID NO: 28533 - DNA, 25 bp, synthetic construct
  misc_feature 1..25: note = Oligonucleotide
  source 1..25: mol_type = other DNA
cggcagctacaacaggacggtccca

SEQ ID NO: 28534 - DNA, 25 bp, synthetic construct
  misc_feature 1..25: note = Oligonucleotide
  source 1..25: mol_type = other DNA
ctccggcagctacaacaggacggtc

SEQ ID NO: 28535 - DNA, 25 bp, synthetic construct
  misc_feature 1..25: note = Oligonucleotide
  source 1..25: mol_type = other DNA
ggactccggcagctacaacaggacg

SEQ ID NO: 28536 - DNA, 25 bp, synthetic construct
  misc_feature 1..25: note = Oligonucleotide
  source 1..25: mol_type = other DNA
aggggactccggcagctacaacagg

SEQ ID NO: 28537 - DNA, 25 bp, synthetic construct
  misc_feature 1..25: note = Oligonucleotide
  source 1..25: mol_type = other DNA
cagaggggactccggcagctacaac

SEQ ID NO: 28538 - DNA, 25 bp, synthetic construct
  misc_feature 1..25: note = Oligonucleotide
  source 1..25: mol_type = other DNA
gcccagaggggactccggcagctac

SEQ ID NO: 28539 - DNA, 25 bp, synthetic construct
  misc_feature 1..25: note = Oligonucleotide
  source 1..25: mol_type = other DNA
ctcgcccagaggggactccggcagc

SEQ ID NO: 28540 - DNA, 25 bp, synthetic construct
  misc_feature 1..25: note = Oligonucleotide
  source 1..25: mol_type = other DNA
caactcgcccagaggggactccggc

SEQ ID NO: 28541 - DNA, 25 bp, synthetic construct
  misc_feature 1..25: note = Oligonucleotide
  source 1..25: mol_type = other DNA
cagcaactcgcccagaggggactcc

SEQ ID NO: 28542 - DNA, 25 bp, synthetic construct
  misc_feature 1..25: note = Oligonucleotide
  source 1..25: mol_type = other DNA
cagcagcaactcgcccagaggggac

SEQ ID NO: 28543 - DNA, 25 bp, synthetic construct
  misc_feature 1..25: note = Oligonucleotide
  source 1..25: mol_type = other DNA
ggccagcagcaactcgcccagaggg

SEQ ID NO: 28544 - DNA, 25 bp, synthetic construct
  misc_feature 1..25: note = Oligonucleotide
  source 1..25: mol_type = other DNA
cctggccagcagcaactcgcccaga

SEQ ID NO: 28545 - DNA, 25 bp, synthetic construct
  misc_feature 1..25: note = Oligonucleotide
  source 1..25: mol_type = other DNA
cagcctggccagcagcaactcgccc

SEQ ID NO: 28546 - DNA, 25 bp, synthetic construct
  misc_feature 1..25: note = Oligonucleotide
  source 1..25: mol_type = other DNA
tcccagcctggccagcagcaactcg

SEQ ID NO: 28547 - DNA, 25 bp, synthetic construct
  misc_feature 1..25: note = Oligonucleotide
  source 1..25: mol_type = other DNA
ccgtcccagcctggccagcagcaac

SEQ ID NO: 28548 - DNA, 25 bp, synthetic construct
  misc_feature 1..25: note = Oligonucleotide
  source 1..25: mol_type = other DNA
ggaccgtcccagcctggccagcagc

SEQ ID NO: 28549 - DNA, 25 bp, synthetic construct
  misc_feature 1..25: note = Oligonucleotide
  source 1..25: mol_type = other DNA
acaggaccgtcccagcctggccagc

SEQ ID NO: 28550 - DNA, 25 bp, synthetic construct
  misc_feature 1..25: note = Oligonucleotide
  source 1..25: mol_type = other DNA
acaacaggaccgtcccagcctggcc

SEQ ID NO: 28551 - DNA, 25 bp, synthetic construct
  misc_feature 1..25: note = Oligonucleotide
  source 1..25: mol_type = other DNA
gctacaacaggaccgtcccagcctg

SEQ ID NO: 28552 - DNA, 25 bp, synthetic construct
  misc_feature 1..25: note = Oligonucleotide
  source 1..25: mol_type = other DNA
gcagctacaacaggaccgtcccagc

SEQ ID NO: 28553 - DNA, 25 bp, synthetic construct
  misc_feature 1..25: note = Oligonucleotide
  source 1..25: mol_type = other DNA
ccggcagctacaacaggaccgtccc

SEQ ID NO: 28554 - DNA, 25 bp, synthetic construct
  misc_feature 1..25: note = Oligonucleotide
  source 1..25: mol_type = other DNA
actccggcagctacaacaggaccgt

SEQ ID NO: 28555 - DNA, 25 bp, synthetic construct
  misc_feature 1..25: note = Oligonucleotide
  source 1..25: mol_type = other DNA
gggactccggcagctacaacaggac

SEQ ID NO: 28556 - DNA, 25 bp, synthetic construct
  misc_feature 1..25: note = Oligonucleotide
  source 1..25: mol_type = other DNA
gaggggactccggcagctacaacag

SEQ ID NO: 28557 - DNA, 25 bp, synthetic construct
  misc_feature 1..25: note = Oligonucleotide
  source 1..25: mol_type = other DNA
ccagaggggactccggcagctacaa

SEQ ID NO: 28558 - DNA, 25 bp, synthetic construct
  misc_feature 1..25: note = Oligonucleotide
  source 1..25: mol_type = other DNA
ctcccagaggggactccggcagcta

SEQ ID NO: 28559 - DNA, 25 bp, synthetic construct
  misc_feature 1..25: note = Oligonucleotide
  source 1..25: mol_type = other DNA
actctcccagaggggactccggcag

SEQ ID NO: 28560 - DNA, 25 bp, synthetic construct
  misc_feature 1..25: note = Oligonucleotide
  source 1..25: mol_type = other DNA
gcaactctcccagaggggactccgg

SEQ ID NO: 28561 - DNA, 25 bp, synthetic construct
  misc_feature 1..25: note = Oligonucleotide
  source 1..25: mol_type = other DNA
gcagcaactctcccagaggggactc

SEQ ID NO: 28562 - DNA, 25 bp, synthetic construct
  misc_feature 1..25: note = Oligonucleotide
  source 1..25: mol_type = other DNA
ccagcagcaactctcccagagggga

SEQ ID NO: 28563 - DNA, 25 bp, synthetic construct
  misc_feature 1..25: note = Oligonucleotide
  source 1..25: mol_type = other DNA
tggccagcagcaactctcccagagg

SEQ ID NO: 28564 - DNA, 25 bp, synthetic construct
  misc_feature 1..25: note = Oligonucleotide
  source 1..25: mol_type = other DNA
gcctggccagcagcaactctcccag

SEQ ID NO: 28565 - DNA, 25 bp, synthetic construct
  misc_feature 1..25: note = Oligonucleotide
  source 1..25: mol_type = other DNA
ccagcctggccagcagcaactctcc

SEQ ID NO: 28566 - DNA, 25 bp, synthetic construct
  misc_feature 1..25: note = Oligonucleotide
  source 1..25: mol_type = other DNA
gtcccagcctggccagcagcaactc

SEQ ID NO: 28567 - DNA, 25 bp, synthetic construct
  misc_feature 1..25: note = Oligonucleotide
  source 1..25: mol_type = other DNA
atggtcccagcctggccagcagcaa

SEQ ID NO: 28568 - DNA, 25 bp, synthetic construct
  misc_feature 1..25: note = Oligonucleotide
  source 1..25: mol_type = other DNA
aggatggtcccagcctggccagcag

SEQ ID NO: 28569 - DNA, 25 bp, synthetic construct
  misc_feature 1..25: note = Oligonucleotide
  source 1..25: mol_type = other DNA
aacaggatggtcccagcctggccag

SEQ ID NO: 28570 - DNA, 25 bp, synthetic construct
  misc_feature 1..25: note = Oligonucleotide
  source 1..25: mol_type = other DNA
tacaacaggatggtcccagcctggc

SEQ ID NO: 28571 - DNA, 25 bp, synthetic construct
  misc_feature 1..25: note = Oligonucleotide
  source 1..25: mol_type = other DNA
agctacaacaggatggtcccagcct

SEQ ID NO: 28572 - DNA, 25 bp, synthetic construct
  misc_feature 1..25: note = Oligonucleotide
  source 1..25: mol_type = other DNA
ggcagctacaacaggatggtcccag

SEQ ID NO: 28573 - DNA, 25 bp, synthetic construct
  misc_feature 1..25: note = Oligonucleotide
  source 1..25: mol_type = other DNA
tccggcagctacaacaggatggtcc

SEQ ID NO: 28574 - DNA, 25 bp, synthetic construct
  misc_feature 1..25: note = Oligonucleotide
  source 1..25: mol_type = other DNA
gactccggcagctacaacaggatgg

SEQ ID NO: 28575 - DNA, 25 bp, synthetic construct
  misc_feature 1..25: note = Oligonucleotide
  source 1..25: mol_type = other DNA
ggggactccggcagctacaacagga

SEQ ID NO: 28576 - DNA, 25 bp, synthetic construct
  misc_feature 1..25: note = Oligonucleotide
  source 1..25: mol_type = other DNA
agaggggactccggcagctacaaca

SEQ ID NO: 28577 - DNA, 25 bp, synthetic construct
  misc_feature 1..25: note = Oligonucleotide
  source 1..25: mol_type = other DNA
accagaggggactccggcagctaca

SEQ ID NO: 28578 - DNA, 25 bp, synthetic construct
  misc_feature 1..25: note = Oligonucleotide
  source 1..25: mol_type = other DNA
ggcaccagaggggactccggcagct

SEQ ID NO: 28579 - DNA, 25 bp, synthetic construct
  misc_feature 1..25: note = Oligonucleotide
  source 1..25: mol_type = other DNA
acaggcaccagaggggactccggca

SEQ ID NO: 28580 - DNA, 25 bp, synthetic construct
  misc_feature 1..25: note = Oligonucleotide
  source 1..25: mol_type = other DNA
ggcacaggcaccagaggggactccg

SEQ ID NO: 28581 - DNA, 25 bp, synthetic construct
  misc_feature 1..25: note = Oligonucleotide
  source 1..25: mol_type = other DNA
agaggcacaggcaccagaggggact

SEQ ID NO: 28582 - DNA, 25 bp, synthetic construct
  misc_feature 1..25: note = Oligonucleotide
  source 1..25: mol_type = other DNA
gagagaggcacaggcaccagagggg

SEQ ID NO: 28583 - DNA, 25 bp, synthetic construct
  misc_feature 1..25: note = Oligonucleotide
  source 1..25: mol_type = other DNA
ccagagagaggcacaggcaccagag

SEQ ID NO: 28584 - DNA, 25 bp, synthetic construct
  misc_feature 1..25: note = Oligonucleotide
  source 1..25: mol_type = other DNA
ataccagagagaggcacaggcacca

SEQ ID NO: 28585 - DNA, 25 bp, synthetic construct
  misc_feature 1..25: note = Oligonucleotide
  source 1..25: mol_type = other DNA
catataccagagagaggcacaggca

SEQ ID NO: 28586 - DNA, 25 bp, synthetic construct
  misc_feature 1..25: note = Oligonucleotide
  source 1..25: mol_type = other DNA
gtccatataccagagagaggcacag

SEQ ID NO: 28587 - DNA, 25 bp, synthetic construct
  misc_feature 1..25: note = Oligonucleotide
  source 1..25: mol_type = other DNA
ggagtccatataccagagagaggca

SEQ ID NO: 28588 - DNA, 25 bp, synthetic construct
  misc_feature 1..25: note = Oligonucleotide
  source 1..25: mol_type = other DNA
ctgggagtccatataccagagagag

SEQ ID NO: 28589 - DNA, 25 bp, synthetic construct
  misc_feature 1..25: note = Oligonucleotide
  source 1..25: mol_type = other DNA
gtcctgggagtccatataccagaga

SEQ ID NO: 28590 - DNA, 25 bp, synthetic construct
  misc_feature 1..25: note = Oligonucleotide
  source 1..25: mol_type = other DNA
ggggtcctgggagtccatataccag

SEQ ID NO: 28591 - DNA, 25 bp, synthetic construct
  misc_feature 1..25: note = Oligonucleotide
  source 1..25: mol_type = other DNA
aagggggtcctgggagtccatatac

SEQ ID NO: 28592 - DNA, 25 bp, synthetic construct
  misc_feature 1..25: note = Oligonucleotide
  source 1..25: mol_type = other DNA
aggaagggggtcctgggagtccata

SEQ ID NO: 28593 - DNA, 25 bp, synthetic construct
  misc_feature 1..25: note = Oligonucleotide
  source 1..25: mol_type = other DNA
ggcaggaagggggtcctgggagtcc

SEQ ID NO: 28594 - DNA, 25 bp, synthetic construct
  misc_feature 1..25: note = Oligonucleotide
  source 1..25: mol_type = other DNA
catggcaggaagggggtcctgggag

SEQ ID NO: 28595 - DNA, 25 bp, synthetic construct
  misc_feature 1..25: note = Oligonucleotide
  source 1..25: mol_type = other DNA
actcatggcaggaagggggtcctgg

SEQ ID NO: 28596 - DNA, 25 bp, synthetic construct
  misc_feature 1..25: note = Oligonucleotide
  source 1..25: mol_type = other DNA
aacactcatggcaggaagggggtcc

SEQ ID NO: 28597 - DNA, 25 bp, synthetic construct
  misc_feature 1..25: note = Oligonucleotide
  source 1..25: mol_type = other DNA
gtaaacactcatggcaggaaggggg

SEQ ID NO: 28598 - DNA, 25 bp, synthetic construct
  misc_feature 1..25: note = Oligonucleotide
  source 1..25: mol_type = other DNA
cgagtaaacactcatggcaggaagg

SEQ ID NO: 28599 - DNA, 25 bp, synthetic construct
  misc_feature 1..25: note = Oligonucleotide
  source 1..25: mol_type = other DNA
ccacgagtaaacactcatggcagga

SEQ ID NO: 28600 - DNA, 25 bp, synthetic construct
  misc_feature 1..25: note = Oligonucleotide
  source 1..25: mol_type = other DNA
cacccacgagtaaacactcatggca

SEQ ID NO: 28601 - DNA, 25 bp, synthetic construct
  misc_feature 1..25: note = Oligonucleotide
  source 1..25: mol_type = other DNA
ggacacccacgagtaaacactcatg

SEQ ID NO: 28602 - DNA, 25 bp, synthetic construct
  misc_feature 1..25: note = Oligonucleotide
  source 1..25: mol_type = other DNA
tggggacacccacgagtaaacactc

SEQ ID NO: 28603 - DNA, 25 bp, synthetic construct
  misc_feature 1..25: note = Oligonucleotide
  source 1..25: mol_type = other DNA
aaatggggacacccacgagtaaaca

SEQ ID NO: 28604 - DNA, 25 bp, synthetic construct
  misc_feature 1..25: note = Oligonucleotide
  source 1..25: mol_type = other DNA
aaaaaatggggacacccacgagtaa

SEQ ID NO: 28605 - DNA, 25 bp, synthetic construct
  misc_feature 1..25: note = Oligonucleotide
  source 1..25: mol_type = other DNA
aacaaaaaatggggacacccacgag

SEQ ID NO: 28606 - DNA, 25 bp, synthetic construct
  misc_feature 1..25: note = Oligonucleotide
  source 1..25: mol_type = other DNA
aaaaacaaaaaatggggacacccac

SEQ ID NO: 28607 - DNA, 25 bp, synthetic construct
  misc_feature 1..25: note = Oligonucleotide
  source 1..25: mol_type = other DNA
aacaaaaacaaaaaatggggacacc

SEQ ID NO: 28608 - DNA, 25 bp, synthetic construct
  misc_feature 1..25: note = Oligonucleotide
  source 1..25: mol_type = other DNA
taaaacaaaaacaaaaaatggggac

SEQ ID NO: 28609 - DNA, 25 bp, synthetic construct
  misc_feature 1..25: note = Oligonucleotide
  source 1..25: mol_type = other DNA
aattaaaacaaaaacaaaaaatggg

SEQ ID NO: 28610 - DNA, 25 bp, synthetic construct
  misc_feature 1..25: note = Oligonucleotide
  source 1..25: mol_type = other DNA
tcaaattaaaacaaaaacaaaaaat

SEQ ID NO: 28611 - DNA, 25 bp, synthetic construct
  misc_feature 1..25: note = Oligonucleotide
  source 1..25: mol_type = other DNA
acttcaaattaaaacaaaaacaaaa

SEQ ID NO: 28612 - DNA, 25 bp, synthetic construct
  misc_feature 1..25: note = Oligonucleotide
  source 1..25: mol_type = other DNA
gtcacttcaaattaaaacaaaaaca

SEQ ID NO: 28613 - DNA, 25 bp, synthetic construct
  misc_feature 1..25: note = Oligonucleotide
  source 1..25: mol_type = other DNA
gctgtcacttcaaattaaaacaaaa

SEQ ID NO: 28614 - DNA, 25 bp, synthetic construct
  misc_feature 1..25: note = Oligonucleotide
  source 1..25: mol_type = other DNA
cccgctgtcacttcaaattaaaaca

SEQ ID NO: 28615 - DNA, 25 bp, synthetic construct
  misc_feature 1..25: note = Oligonucleotide
  source 1..25: mol_type = other DNA
ctgcccgctgtcacttcaaattaaa

SEQ ID NO: 28616 - DNA, 25 bp, synthetic construct
  misc_feature 1..25: note = Oligonucleotide
  source 1..25: mol_type = other DNA
ttgctgcccgctgtcacttcaaatt

SEQ ID NO: 28617 - DNA, 25 bp, synthetic construct
  misc_feature 1..25: note = Oligonucleotide
  source 1..25: mol_type = other DNA
cgtttgctgcccgctgtcacttcaa

SEQ ID NO: 28618 - DNA, 25 bp, synthetic construct
  misc_feature 1..25: note = Oligonucleotide
  source 1..25: mol_type = other DNA
agacgtttgctgcccgctgtcactt

SEQ ID NO: 28619 - DNA, 25 bp, synthetic construct
  misc_feature 1..25: note = Oligonucleotide
  source 1..25: mol_type = other DNA
tccagacgtttgctgcccgctgtca

SEQ ID NO: 28620 - DNA, 25 bp, synthetic construct
  misc_feature 1..25: note = Oligonucleotide
  source 1..25: mol_type = other DNA
tgctccagacgtttgctgcccgctg

SEQ ID NO: 28621 - DNA, 25 bp, synthetic construct
  misc_feature 1..25: note = Oligonucleotide
  source 1..25: mol_type = other DNA
atctgctccagacgtttgctgcccg

SEQ ID NO: 28622 - DNA, 25 bp, synthetic construct
  misc_feature 1..25: note = Oligonucleotide
  source 1..25: mol_type = other DNA
aacatctgctccagacgtttgctgc

SEQ ID NO: 28623 - DNA, 25 bp, synthetic construct
  misc_feature 1..25: note = Oligonucleotide
  source 1..25: mol_type = other DNA
cctaacatctgctccagacgtttgc

SEQ ID NO: 28624 - DNA, 25 bp, synthetic construct
  misc_feature 1..25: note = Oligonucleotide
  source 1..25: mol_type = other DNA
aaccctaacatctgctccagacgtt

SEQ ID NO: 28625 - DNA, 25 bp, synthetic construct
  misc_feature 1..25: note = Oligonucleotide
  source 1..25: mol_type = other DNA
tccaaccctaacatctgctccagac

SEQ ID NO: 28626 - DNA, 25 bp, synthetic construct
  misc_feature 1..25: note = Oligonucleotide
  source 1..25: mol_type = other DNA
gagtccaaccctaacatctgctcca

SEQ ID NO: 28627 - DNA, 25 bp, synthetic construct
  misc_feature 1..25: note = Oligonucleotide
  source 1..25: mol_type = other DNA
tgagagtccaaccctaacatctgct

SEQ ID NO: 28628 - DNA, 25 bp, synthetic construct
  misc_feature 1..25: note = Oligonucleotide
  source 1..25: mol_type = other DNA
aagtgagagtccaaccctaacatct

SEQ ID NO: 28629 - DNA, 25 bp, synthetic construct
  misc_feature 1..25: note = Oligonucleotide
  source 1..25: mol_type = other DNA
accaagtgagagtccaaccctaaca

SEQ ID NO: 28630 - DNA, 25 bp, synthetic construct
  misc_feature 1..25: note = Oligonucleotide
  source 1..25: mol_type = other DNA
agaaccaagtgagagtccaacccta

SEQ ID NO: 28631 - DNA, 25 bp, synthetic construct
  misc_feature 1..25: note = Oligonucleotide
  source 1..25: mol_type = other DNA
attagaaccaagtgagagtccaacc

SEQ ID NO: 28632 - DNA, 25 bp, synthetic construct
  misc_feature 1..25: note = Oligonucleotide
  source 1..25: mol_type = other DNA
cacattagaaccaagtgagagtcca

SEQ ID NO: 28633 - DNA, 25 bp, synthetic construct
  misc_feature 1..25: note = Oligonucleotide
  source 1..25: mol_type = other DNA
cctcacattagaaccaagtgagagt

SEQ ID NO: 28634 - DNA, 25 bp, synthetic construct
  misc_feature 1..25: note = Oligonucleotide
  source 1..25: mol_type = other DNA
tgacctcacattagaaccaagtgag

SEQ ID NO: 28635 - DNA, 25 bp, synthetic construct
  misc_feature 1..25: note = Oligonucleotide
  source 1..25: mol_type = other DNA
ccatgacctcacattagaaccaagt

SEQ ID NO: 28636 - DNA, 25 bp, synthetic construct
  misc_feature 1..25: note = Oligonucleotide
  source 1..25: mol_type = other DNA
tgaccatgacctcacattagaacca

SEQ ID NO: 28637 - DNA, 25 bp, synthetic construct
  misc_feature 1..25: note = Oligonucleotide
  source 1..25: mol_type = other DNA
ccctgaccatgacctcacattagaa

SEQ ID NO: 28638 - DNA, 25 bp, synthetic construct
  misc_feature 1..25: note = Oligonucleotide
  source 1..25: mol_type = other DNA
cagccctgaccatgacctcacatta

SEQ ID NO: 28639 - DNA, 25 bp, synthetic construct
  misc_feature 1..25: note = Oligonucleotide
  source 1..25: mol_type = other DNA
ctccagccctgaccatgacctcaca

SEQ ID NO: 28640 - DNA, 25 bp, synthetic construct
  misc_feature 1..25: note = Oligonucleotide
  source 1..25: mol_type = other DNA
caactccagccctgaccatgacctc

SEQ ID NO: 28641 - DNA, 25 bp, synthetic construct
  misc_feature 1..25: note = Oligonucleotide
  source 1..25: mol_type = other DNA
attcaactccagccctgaccatgac

SEQ ID NO: 28642 - DNA, 25 bp, synthetic construct
  misc_feature 1..25: note = Oligonucleotide
  source 1..25: mol_type = other DNA
aaaattcaactccagccctgaccat

SEQ ID NO: 28643 - DNA, 25 bp, synthetic construct
  misc_feature 1..25: note = Oligonucleotide
  source 1..25: mol_type = other DNA
tccaaaattcaactccagccctgac

SEQ ID NO: 28644 - DNA, 25 bp, synthetic construct
  misc_feature 1..25: note = Oligonucleotide
  source 1..25: mol_type = other DNA
cagtccaaaattcaactccagccct

SEQ ID NO: 28645 - DNA, 25 bp, synthetic construct
  misc_feature 1..25: note = Oligonucleotide
  source 1..25: mol_type = other DNA
ccccagtccaaaattcaactccagc

SEQ ID NO: 28646 - DNA, 25 bp, synthetic construct
  misc_feature 1..25: note = Oligonucleotide
  source 1..25: mol_type = other DNA
taaccccagtccaaaattcaactcc

SEQ ID NO: 28647 - DNA, 25 bp, synthetic construct
  misc_feature 1..25: note = Oligonucleotide
  source 1..25: mol_type = other DNA
tcttaaccccagtccaaaattcaac

SEQ ID NO: 28648 - DNA, 25 bp, synthetic construct
  misc_feature 1..25: note = Oligonucleotide
  source 1..25: mol_type = other DNA
taatcttaaccccagtccaaaattc

SEQ ID NO: 28649 - DNA, 25 bp, synthetic construct
  misc_feature 1..25: note = Oligonucleotide
  source 1..25: mol_type = other DNA
ccttaatcttaaccccagtccaaaa

SEQ ID NO: 28650 - DNA, 25 bp, synthetic construct
  misc_feature 1..25: note = Oligonucleotide
  source 1..25: mol_type = other DNA
cgaccttaatcttaaccccagtcca

SEQ ID NO: 28651 - DNA, 25 bp, synthetic construct
  misc_feature 1..25: note = Oligonucleotide
  source 1..25: mol_type = other DNA
aaccgaccttaatcttaaccccagt

SEQ ID NO: 28652 - DNA, 25 bp, synthetic construct
  misc_feature 1..25: note = Oligonucleotide
  source 1..25: mol_type = other DNA
tgaaaccgaccttaatcttaacccc

SEQ ID NO: 28653 - DNA, 25 bp, synthetic construct
  misc_feature 1..25: note = Oligonucleotide
  source 1..25: mol_type = other DNA
acatgaaaccgaccttaatcttaac

SEQ ID NO: 28654 - DNA, 25 bp, synthetic construct
  misc_feature 1..25: note = Oligonucleotide
  source 1..25: mol_type = other DNA
taaacatgaaaccgaccttaatctt

SEQ ID NO: 28655 - DNA, 25 bp, synthetic construct
  misc_feature 1..25: note = Oligonucleotide
  source 1..25: mol_type = other DNA
ccttaaacatgaaaccgaccttaat

SEQ ID NO: 28656 - DNA, 25 bp, synthetic construct
  misc_feature 1..25: note = Oligonucleotide
  source 1..25: mol_type = other DNA
ggcccttaaacatgaaaccgacctt

SEQ ID NO: 28657 - DNA, 25 bp, synthetic construct
  misc_feature 1..25: note = Oligonucleotide
  source 1..25: mol_type = other DNA
aagggcccttaaacatgaaaccgac

SEQ ID NO: 28658 - DNA, 25 bp, synthetic construct
  misc_feature 1..25: note = Oligonucleotide
  source 1..25: mol_type = other DNA
aagaagggcccttaaacatgaaacc

SEQ ID NO: 28659 - DNA, 25 bp, synthetic construct
  misc_feature 1..25: note = Oligonucleotide
  source 1..25: mol_type = other DNA
cagaagaagggcccttaaacatgaa

SEQ ID NO: 28660 - DNA, 25 bp, synthetic construct
  misc_feature 1..25: note = Oligonucleotide
  source 1..25: mol_type = other DNA
ctacagaagaagggcccttaaacat

SEQ ID NO: 28661 - DNA, 25 bp, synthetic construct
  misc_feature 1..25: note = Oligonucleotide
  source 1..25: mol_type = other DNA
actctacagaagaagggcccttaaa

SEQ ID NO: 28662 - DNA, 25 bp, synthetic construct
  misc_feature 1..25: note = Oligonucleotide
  source 1..25: mol_type = other DNA
ggaactctacagaagaagggccctt

SEQ ID NO: 28663 - DNA, 25 bp, synthetic construct
  misc_feature 1..25: note = Oligonucleotide
  source 1..25: mol_type = other DNA
gggggaactctacagaagaagggcc

SEQ ID NO: 28664 - DNA, 25 bp, synthetic construct
  misc_feature 1..25: note = Oligonucleotide
  source 1..25: mol_type = other DNA
tcagggggaactctacagaagaagg

SEQ ID NO: 28665 - DNA, 25 bp, synthetic construct
  misc_feature 1..25: note = Oligonucleotide
  source 1..25: mol_type = other DNA
tgttcagggggaactctacagaaga

SEQ ID NO: 28666 - DNA, 25 bp, synthetic construct
  misc_feature 1..25: note = Oligonucleotide
  source 1..25: mol_type = other DNA
ggatgttcagggggaactctacaga

SEQ ID NO: 28667 - DNA, 25 bp, synthetic construct
  misc_feature 1..25: note = Oligonucleotide
  source 1..25: mol_type = other DNA
gggggatgttcagggggaactctac

SEQ ID NO: 28668 - DNA, 25 bp, synthetic construct
  misc_feature 1..25: note = Oligonucleotide
  source 1..25: mol_type = other DNA
acagggggatgttcagggggaactc

SEQ ID NO: 28669 - DNA, 25 bp, synthetic construct
  misc_feature 1..25: note = Oligonucleotide
  source 1..25: mol_type = other DNA
cttacagggggatgttcagggggaa

SEQ ID NO: 28670 - DNA, 25 bp, synthetic construct
  misc_feature 1..25: note = Oligonucleotide
  source 1..25: mol_type = other DNA
agccttacagggggatgttcagggg

SEQ ID NO: 28671 - DNA, 25 bp, synthetic construct
  misc_feature 1..25: note = Oligonucleotide
  source 1..25: mol_type = other DNA
ccaagccttacagggggatgttcag

SEQ ID NO: 28672 - DNA, 25 bp, synthetic construct
  misc_feature 1..25: note = Oligonucleotide
  source 1..25: mol_type = other DNA
taaccaagccttacagggggatgtt

SEQ ID NO: 28673 - DNA, 25 bp, synthetic construct
  misc_feature 1..25: note = Oligonucleotide
  source 1..25: mol_type = other DNA
tcataaccaagccttacagggggat

SEQ ID NO: 28674 - DNA, 25 bp, synthetic construct
  misc_feature 1..25: note = Oligonucleotide
  source 1..25: mol_type = other DNA
ggctcataaccaagccttacagggg

SEQ ID NO: 28675 - DNA, 25 bp, synthetic construct
  misc_feature 1..25: note = Oligonucleotide
  source 1..25: mol_type = other DNA
aggggctcataaccaagccttacag

SEQ ID NO: 28676 - DNA, 25 bp, synthetic construct
  misc_feature 1..25: note = Oligonucleotide
  source 1..25: mol_type = other DNA
tggaggggctcataaccaagcctta

SEQ ID NO: 28677 - DNA, 25 bp, synthetic construct
  misc_feature 1..25: note = Oligonucleotide
  source 1..25: mol_type = other DNA
gggtggaggggctcataaccaagcc

SEQ ID NO: 28678 - DNA, 25 bp, synthetic construct
  misc_feature 1..25: note = Oligonucleotide
  source 1..25: mol_type = other DNA
ctggggtggaggggctcataaccaa

SEQ ID NO: 28679 - DNA, 25 bp, synthetic construct
  misc_feature 1..25: note = Oligonucleotide
  source 1..25: mol_type = other DNA
agcctggggtggaggggctcataac

SEQ ID NO: 28680 - DNA, 25 bp, synthetic construct
  misc_feature 1..25: note = Oligonucleotide
  source 1..25: mol_type = other DNA
cacagcctggggtggaggggctcat

SEQ ID NO: 28681 - DNA, 25 bp, synthetic construct
  misc_feature 1..25: note = Oligonucleotide
  source 1..25: mol_type = other DNA
tgacacagcctggggtggaggggct

SEQ ID NO: 28682 - DNA, 25 bp, synthetic construct
  misc_feature 1..25: note = Oligonucleotide
  source 1..25: mol_type = other DNA
aactgacacagcctggggtggaggg

SEQ ID NO: 28683 - DNA, 25 bp, synthetic construct
  misc_feature 1..25: note = Oligonucleotide
  source 1..25: mol_type = other DNA
ttcaactgacacagcctggggtgga

SEQ ID NO: 28684 - DNA, 25 bp, synthetic construct
  misc_feature 1..25: note = Oligonucleotide
  source 1..25: mol_type = other DNA
tggttcaactgacacagcctggggt

SEQ ID NO: 28685 - DNA, 25 bp, synthetic construct
  misc_feature 1..25: note = Oligonucleotide
  source 1..25: mol_type = other DNA
agatggttcaactgacacagcctgg

SEQ ID NO: 28686 - DNA, 25 bp, synthetic construct
  misc_feature 1..25: note = Oligonucleotide
  source 1..25: mol_type = other DNA
ctcagatggttcaactgacacagcc

SEQ ID NO: 28687 - DNA, 25 bp, synthetic construct
  misc_feature 1..25: note = Oligonucleotide
  source 1..25: mol_type = other DNA
agcctcagatggttcaactgacaca

SEQ ID NO: 28688 - DNA, 25 bp, synthetic construct
  misc_feature 1..25: note = Oligonucleotide
  source 1..25: mol_type = other DNA
cacagcctcagatggttcaactgac

SEQ ID NO: 28689 - DNA, 25 bp, synthetic construct
  misc_feature 1..25: note = Oligonucleotide
  source 1..25: mol_type = other DNA
tgccacagcctcagatggttcaact

SEQ ID NO: 28690 - DNA, 25 bp, synthetic construct
  misc_feature 1..25: note = Oligonucleotide
  source 1..25: mol_type = other DNA
gtctgccacagcctcagatggttca

SEQ ID NO: 28691 - DNA, 25 bp, synthetic construct
  misc_feature 1..25: note = Oligonucleotide
  source 1..25: mol_type = other DNA
agggtctgccacagcctcagatggt

SEQ ID NO: 28692 - DNA, 25 bp, synthetic construct
  misc_feature 1..25: note = Oligonucleotide
  source 1..25: mol_type = other DNA
ccgagggtctgccacagcctcagat

SEQ ID NO: 28693 - DNA, 25 bp, synthetic construct
  misc_feature 1..25: note = Oligonucleotide
  source 1..25: mol_type = other DNA
tcaccgagggtctgccacagcctca

SEQ ID NO: 28694 - DNA, 25 bp, synthetic construct
  misc_feature 1..25: note = Oligonucleotide
  source 1..25: mol_type = other DNA
cattcaccgagggtctgccacagcc

SEQ ID NO: 28695 - DNA, 25 bp, synthetic construct
  misc_feature 1..25: note = Oligonucleotide
  source 1..25: mol_type = other DNA
tggcattcaccgagggtctgccaca

SEQ ID NO: 28696 - DNA, 25 bp, synthetic construct
  misc_feature 1..25: note = Oligonucleotide
  source 1..25: mol_type = other DNA
ctgtggcattcaccgagggtctgcc

SEQ ID NO: 28697 - DNA, 25 bp, synthetic construct
  misc_feature 1..25: note = Oligonucleotide
  source 1..25: mol_type = other DNA
cagctgtggcattcaccgagggtct

SEQ ID NO: 28698 - DNA, 25 bp, synthetic construct
  misc_feature 1..25: note = Oligonucleotide
  source 1..25: mol_type = other DNA
gagcagctgtggcattcaccgaggg

SEQ ID NO: 28699 - DNA, 25 bp, synthetic construct
  misc_feature 1..25: note = Oligonucleotide
  source 1..25: mol_type = other DNA
tgagagcagctgtggcattcaccga

SEQ ID NO: 28700 - DNA, 25 bp, synthetic construct
  misc_feature 1..25: note = Oligonucleotide
  source 1..25: mol_type = other DNA
ccttgagagcagctgtggcattcac

SEQ ID NO: 28701 - DNA, 25 bp, synthetic construct
  misc_feature 1..25: note = Oligonucleotide
  source 1..25: mol_type = other DNA
tggccttgagagcagctgtggcatt

SEQ ID NO: 28702 - DNA, 25 bp, synthetic construct
  misc_feature 1..25: note = Oligonucleotide
  source 1..25: mol_type = other DNA
cagtggccttgagagcagctgtggc

SEQ ID NO: 28703 - DNA, 25 bp, synthetic construct
  misc_feature 1..25: note = Oligonucleotide
  source 1..25: mol_type = other DNA
ctgcagtggccttgagagcagctgt

SEQ ID NO: 28704 - DNA, 25 bp, synthetic construct
  misc_feature 1..25: note = Oligonucleotide
  source 1..25: mol_type = other DNA
tccctgcagtggccttgagagcagc

SEQ ID NO: 28705 - DNA, 25 bp, synthetic construct
  misc_feature 1..25: note = Oligonucleotide
  source 1..25: mol_type = other DNA
acttccctgcagtggccttgagagc

SEQ ID NO: 28706 - DNA, 25 bp, synthetic construct
  misc_feature 1..25: note = Oligonucleotide
  source 1..25: mol_type = other DNA
cacacttccctgcagtggccttgag

SEQ ID NO: 28707 - DNA, 25 bp, synthetic construct
  misc_feature 1..25: note = Oligonucleotide
  source 1..25: mol_type = other DNA
acacacacttccctgcagtggcctt

SEQ ID NO: 28708 - DNA, 25 bp, synthetic construct
  misc_feature 1..25: note = Oligonucleotide
  source 1..25: mol_type = other DNA
tcaacacacacttccctgcagtggc

SEQ ID NO: 28709 - DNA, 25 bp, synthetic construct
  misc_feature 1..25: note = Oligonucleotide
  source 1..25: mol_type = other DNA
tcctcaacacacacttccctgcagt

SEQ ID NO: 28710 - DNA, 25 bp, synthetic construct
  misc_feature 1..25: note = Oligonucleotide
  source 1..25: mol_type = other DNA
acttcctcaacacacacttccctgc

SEQ ID NO: 28711 - DNA, 25 bp, synthetic construct
  misc_feature 1..25: note = Oligonucleotide
  source 1..25: mol_type = other DNA
gttacttcctcaacacacacttccc

SEQ ID NO: 28712 - DNA, 25 bp, synthetic construct
  misc_feature 1..25: note = Oligonucleotide
  source 1..25: mol_type = other DNA
ccagttacttcctcaacacacactt

SEQ ID NO: 28713 - DNA, 25 bp, synthetic construct
  misc_feature 1..25: note = Oligonucleotide
  source 1..25: mol_type = other DNA
ggcccagttacttcctcaacacaca

SEQ ID NO: 28714 - DNA, 25 bp, synthetic construct
  misc_feature 1..25: note = Oligonucleotide
  source 1..25: mol_type = other DNA
actggcccagttacttcctcaacac

SEQ ID NO: 28715 - DNA, 25 bp, synthetic construct
  misc_feature 1..25: note = Oligonucleotide
  source 1..25: mol_type = other DNA
cccactggcccagttacttcctcaa

SEQ ID NO: 28716 - DNA, 25 bp, synthetic construct
  misc_feature 1..25: note = Oligonucleotide
  source 1..25: mol_type = other DNA
catcccactggcccagttacttcct

SEQ ID NO: 28717 - DNA, 25 bp, synthetic construct
  misc_feature 1..25: note = Oligonucleotide
  source 1..25: mol_type = other DNA
acccatcccactggcccagttactt

SEQ ID NO: 28718 - DNA, 25 bp, synthetic construct
  misc_feature 1..25: note = Oligonucleotide
  source 1..25: mol_type = other DNA
cctacccatcccactggcccagtta

SEQ ID NO: 28719 - DNA, 25 bp, synthetic construct
  misc_feature 1..25: note = Oligonucleotide
  source 1..25: mol_type = other DNA
gatcctacccatcccactggcccag

SEQ ID NO: 28720 - DNA, 25 bp, synthetic construct
  misc_feature 1..25: note = Oligonucleotide
  source 1..25: mol_type = other DNA
tccgatcctacccatcccactggcc

SEQ ID NO: 28721 - DNA, 25 bp, synthetic construct
  misc_feature 1..25: note = Oligonucleotide
  source 1..25: mol_type = other DNA
gactccgatcctacccatcccactg

SEQ ID NO: 28722 - DNA, 25 bp, synthetic construct
  misc_feature 1..25: note = Oligonucleotide
  source 1..25: mol_type = other DNA
ctggactccgatcctacccatccca

SEQ ID NO: 28723 - DNA, 25 bp, synthetic construct
  misc_feature 1..25: note = Oligonucleotide
  source 1..25: mol_type = other DNA
accctggactccgatcctacccatc

SEQ ID NO: 28724 - DNA, 25 bp, synthetic construct
  misc_feature 1..25: note = Oligonucleotide
  source 1..25: mol_type = other DNA
ctgaccctggactccgatcctaccc

SEQ ID NO: 28725 - DNA, 25 bp, synthetic construct
  misc_feature 1..25: note = Oligonucleotide
  source 1..25: mol_type = other DNA
gacctgaccctggactccgatccta

SEQ ID NO: 28726 - DNA, 25 bp, synthetic construct
  misc_feature 1..25: note = Oligonucleotide
  source 1..25: mol_type = other DNA
cctgacctgaccctggactccgatc

SEQ ID NO: 28727 - DNA, 25 bp, synthetic construct
  misc_feature 1..25: note = Oligonucleotide
  source 1..25: mol_type = other DNA
tcccctgacctgaccctggactccg

SEQ ID NO: 28728 - DNA, 25 bp, synthetic construct
  misc_feature 1..25: note = Oligonucleotide
  source 1..25: mol_type = other DNA
ttctcccctgacctgaccctggact

SEQ ID NO: 28729 - DNA, 25 bp, synthetic construct
  misc_feature 1..25: note = Oligonucleotide
  source 1..25: mol_type = other DNA
cagttctcccctgacctgaccctgg

SEQ ID NO: 28730 - DNA, 25 bp, synthetic construct
  misc_feature 1..25: note = Oligonucleotide
  source 1..25: mol_type = other DNA
ccacagttctcccctgacctgaccc

SEQ ID NO: 28731 - DNA, 25 bp, synthetic construct
  misc_feature 1..25: note = Oligonucleotide
  source 1..25: mol_type = other DNA
ttaccacagttctcccctgacctga

SEQ ID NO: 28732 - DNA, 25 bp, synthetic construct
  misc_feature 1..25: note = Oligonucleotide
  source 1..25: mol_type = other DNA
accttaccacagttctcccctgacc

SEQ ID NO: 28733 - DNA, 25 bp, synthetic construct
  misc_feature 1..25: note = Oligonucleotide
  source 1..25: mol_type = other DNA
caaaccttaccacagttctcccctg

SEQ ID NO: 28734 - DNA, 25 bp, synthetic construct
  misc_feature 1..25: note = Oligonucleotide
  source 1..25: mol_type = other DNA
acccaaaccttaccacagttctccc

SEQ ID NO: 28735 - DNA, 25 bp, synthetic construct
  misc_feature 1..25: note = Oligonucleotide
  source 1..25: mol_type = other DNA
caaacccaaaccttaccacagttct

SEQ ID NO: 28736 - DNA, 25 bp, synthetic construct
  misc_feature 1..25: note = Oligonucleotide
  source 1..25: mol_type = other DNA
atgcaaacccaaaccttaccacagt

SEQ ID NO: 28737 - DNA, 25 bp, synthetic construct
  misc_feature 1..25: note = Oligonucleotide
  source 1..25: mol_type = other DNA
cttatgcaaacccaaaccttaccac

SEQ ID NO: 28738 - DNA, 25 bp, synthetic construct
  misc_feature 1..25: note = Oligonucleotide
  source 1..25: mol_type = other DNA
ccccttatgcaaacccaaaccttac

SEQ ID NO: 28739 - DNA, 25 bp, synthetic construct
  misc_feature 1..25: note = Oligonucleotide
  source 1..25: mol_type = other DNA
ctgccccttatgcaaacccaaacct

SEQ ID NO: 28740 - DNA, 25 bp, synthetic construct
  misc_feature 1..25: note = Oligonucleotide
  source 1..25: mol_type = other DNA
ctgctgccccttatgcaaacccaaa

SEQ ID NO: 28741 - DNA, 25 bp, synthetic construct
  misc_feature 1..25: note = Oligonucleotide
  source 1..25: mol_type = other DNA
tatctgctgccccttatgcaaaccc

SEQ ID NO: 28742 - DNA, 25 bp, synthetic construct
  misc_feature 1..25: note = Oligonucleotide
  source 1..25: mol_type = other DNA
aactatctgctgccccttatgcaaa

SEQ ID NO: 28743 - DNA, 25 bp, synthetic construct
  misc_feature 1..25: note = Oligonucleotide
  source 1..25: mol_type = other DNA
agtaactatctgctgccccttatgc

SEQ ID NO: 28744 - DNA, 25 bp, synthetic construct
  misc_feature 1..25: note = Oligonucleotide
  source 1..25: mol_type = other DNA
agaagtaactatctgctgcccctta

SEQ ID NO: 28745 - DNA, 25 bp, synthetic construct
  misc_feature 1..25: note = Oligonucleotide
  source 1..25: mol_type = other DNA
accagaagtaactatctgctgcccc

SEQ ID NO: 28746 - DNA, 25 bp, synthetic construct
  misc_feature 1..25: note = Oligonucleotide
  source 1..25: mol_type = other DNA
caaaccagaagtaactatctgctgc

SEQ ID NO: 28747 - DNA, 25 bp, synthetic construct
  misc_feature 1..25: note = Oligonucleotide
  source 1..25: mol_type = other DNA
gcccaaaccagaagtaactatctgc

SEQ ID NO: 28748 - DNA, 25 bp, synthetic construct
  misc_feature 1..25: note = Oligonucleotide
  source 1..25: mol_type = other DNA
ccagcccaaaccagaagtaactatc

SEQ ID NO: 28749 - DNA, 25 bp, synthetic construct
  misc_feature 1..25: note = Oligonucleotide
  source 1..25: mol_type = other DNA
acaccagcccaaaccagaagtaact

SEQ ID NO: 28750 - DNA, 25 bp, synthetic construct
  misc_feature 1..25: note = Oligonucleotide
  source 1..25: mol_type = other DNA
aaaacaccagcccaaaccagaagta

SEQ ID NO: 28751 - DNA, 25 bp, synthetic construct
  misc_feature 1..25: note = Oligonucleotide
  source 1..25: mol_type = other DNA
tccaaaacaccagcccaaaccagaa

SEQ ID NO: 28752 - DNA, 25 bp, synthetic construct
  misc_feature 1..25: note = Oligonucleotide
  source 1..25: mol_type = other DNA
acctccaaaacaccagcccaaacca

SEQ ID NO: 28753 - DNA, 25 bp, synthetic construct
  misc_feature 1..25: note = Oligonucleotide
  source 1..25: mol_type = other DNA
gccacctccaaaacaccagcccaaa

SEQ ID NO: 28754 - DNA, 25 bp, synthetic construct
  misc_feature 1..25: note = Oligonucleotide
  source 1..25: mol_type = other DNA
agggccacctccaaaacaccagccc

SEQ ID NO: 28755 - DNA, 25 bp, synthetic construct
  misc_feature 1..25: note = Oligonucleotide
  source 1..25: mol_type = other DNA
ctaagggccacctccaaaacaccag

SEQ ID NO: 28756 - DNA, 25 bp, synthetic construct
  misc_feature 1..25: note = Oligonucleotide
  source 1..25: mol_type = other DNA
acactaagggccacctccaaaacac

SEQ ID NO: 28757 - DNA, 25 bp, synthetic construct
  misc_feature 1..25: note = Oligonucleotide
  source 1..25: mol_type = other DNA
ccaacactaagggccacctccaaaa

SEQ ID NO: 28758 - DNA, 25 bp, synthetic construct
  misc_feature 1..25: note = Oligonucleotide
  source 1..25: mol_type = other DNA
cttccaacactaagggccacctcca

SEQ ID NO: 28759 - DNA, 25 bp, synthetic construct
  misc_feature 1..25: note = Oligonucleotide
  source 1..25: mol_type = other DNA
ggccttccaacactaagggccacct

SEQ ID NO: 28760 - DNA, 25 bp, synthetic construct
  misc_feature 1..25: note = Oligonucleotide
  source 1..25: mol_type = other DNA
cagggccttccaacactaagggcca

SEQ ID NO: 28761 - DNA, 25 bp, synthetic construct
  misc_feature 1..25: note = Oligonucleotide
  source 1..25: mol_type = other DNA
aaccagggccttccaacactaaggg

SEQ ID NO: 28762 - DNA, 25 bp, synthetic construct
  misc_feature 1..25: note = Oligonucleotide
  source 1..25: mol_type = other DNA
acaaaccagggccttccaacactaa

SEQ ID NO: 28763 - DNA, 25 bp, synthetic construct
  misc_feature 1..25: note = Oligonucleotide
  source 1..25: mol_type = other DNA
tgcacaaaccagggccttccaacac

SEQ ID NO: 28764 - DNA, 25 bp, synthetic construct
  misc_feature 1..25: note = Oligonucleotide
  source 1..25: mol_type = other DNA
acatgcacaaaccagggccttccaa

SEQ ID NO: 28765 - DNA, 25 bp, synthetic construct
  misc_feature 1..25: note = Oligonucleotide
  source 1..25: mol_type = other DNA
cacacatgcacaaaccagggccttc

SEQ ID NO: 28766 - DNA, 25 bp, synthetic construct
  misc_feature 1..25: note = Oligonucleotide
  source 1..25: mol_type = other DNA
ccccacacatgcacaaaccagggcc

SEQ ID NO: 28767 - DNA, 25 bp, synthetic construct
  misc_feature 1..25: note = Oligonucleotide
  source 1..25: mol_type = other DNA
aggccccacacatgcacaaaccagg

SEQ ID NO: 28768 - DNA, 25 bp, synthetic construct
  misc_feature 1..25: note = Oligonucleotide
  source 1..25: mol_type = other DNA
aagaggccccacacatgcacaaacc

SEQ ID NO: 28769 - DNA, 25 bp, synthetic construct
  misc_feature 1..25: note = Oligonucleotide
  source 1..25: mol_type = other DNA
aggaagaggccccacacatgcacaa

SEQ ID NO: 28770 - DNA, 25 bp, synthetic construct
  misc_feature 1..25: note = Oligonucleotide
  source 1..25: mol_type = other DNA
aagaggaagaggccccacacatgca

SEQ ID NO: 28771 - DNA, 25 bp, synthetic construct
  misc_feature 1..25: note = Oligonucleotide
  source 1..25: mol_type = other DNA
aaaaagaggaagaggccccacacat

SEQ ID NO: 28772 - DNA, 25 bp, synthetic construct
  misc_feature 1..25: note = Oligonucleotide
  source 1..25: mol_type = other DNA
aaaaaaaagaggaagaggccccaca

SEQ ID NO: 28773 - DNA, 25 bp, synthetic construct
  misc_feature 1..25: note = Oligonucleotide
  source 1..25: mol_type = other DNA
aaaaaaaaaaagaggaagaggcccc

SEQ ID NO: 28774 - DNA, 25 bp, synthetic construct
  misc_feature 1..25: note = Oligonucleotide
  source 1..25: mol_type = other DNA
aaaaaaaaaaaaaagaggaagaggc

SEQ ID NO: 28775 - DNA, 25 bp, synthetic construct
  misc_feature 1..25: note = Oligonucleotide
  source 1..25: mol_type = other DNA
aaaaaaaaaaaaaaaaagaggaaga

SEQ ID NO: 28776 - DNA, 25 bp, synthetic construct
  misc_feature 1..25: note = Oligonucleotide
  source 1..25: mol_type = other DNA
ctcaaaaaaaaaaaaaaaaagagga

SEQ ID NO: 28777 - DNA, 25 bp, synthetic construct
  misc_feature 1..25: note = Oligonucleotide
  source 1..25: mol_type = other DNA
catctcaaaaaaaaaaaaaaaaaga

SEQ ID NO: 28778 - DNA, 25 bp, synthetic construct
  misc_feature 1..25: note = Oligonucleotide
  source 1..25: mol_type = other DNA
ctccatctcaaaaaaaaaaaaaaaa

SEQ ID NO: 28779 - DNA, 25 bp, synthetic construct
  misc_feature 1..25: note = Oligonucleotide
  source 1..25: mol_type = other DNA
agactccatctcaaaaaaaaaaaaa

SEQ ID NO: 28780 - DNA, 25 bp, synthetic construct
  misc_feature 1..25: note = Oligonucleotide
  source 1..25: mol_type = other DNA
ggcagactccatctcaaaaaaaaaa

SEQ ID NO: 28781 - DNA, 25 bp, synthetic construct
  misc_feature 1..25: note = Oligonucleotide
  source 1..25: mol_type = other DNA
ataggcagactccatctcaaaaaaa

SEQ ID NO: 28782 - DNA, 25 bp, synthetic construct
  misc_feature 1..25: note = Oligonucleotide
  source 1..25: mol_type = other DNA
tacataggcagactccatctcaaaa

SEQ ID NO: 28783 - DNA, 25 bp, synthetic construct
  misc_feature 1..25: note = Oligonucleotide
  source 1..25: mol_type = other DNA
ggctacataggcagactccatctca

SEQ ID NO: 28784 - DNA, 25 bp, synthetic construct
  misc_feature 1..25: note = Oligonucleotide
  source 1..25: mol_type = other DNA
ctgggctacataggcagactccatc

SEQ ID NO: 28785 - DNA, 25 bp, synthetic construct
  misc_feature 1..25: note = Oligonucleotide
  source 1..25: mol_type = other DNA
tgcctgggctacataggcagactcc

SEQ ID NO: 28786 - DNA, 25 bp, synthetic construct
  misc_feature 1..25: note = Oligonucleotide
  source 1..25: mol_type = other DNA
tcctgcctgggctacataggcagac

SEQ ID NO: 28787 - DNA, 25 bp, synthetic construct
  misc_feature 1..25: note = Oligonucleotide
  source 1..25: mol_type = other DNA
cactcctgcctgggctacataggca

SEQ ID NO: 28788 - DNA, 25 bp, synthetic construct
  misc_feature 1..25: note = Oligonucleotide
  source 1..25: mol_type = other DNA
ctgcactcctgcctgggctacatag

SEQ ID NO: 28789 - DNA, 25 bp, synthetic construct
  misc_feature 1..25: note = Oligonucleotide
  source 1..25: mol_type = other DNA
ccactgcactcctgcctgggctaca

SEQ ID NO: 28790 - DNA, 25 bp, synthetic construct
  misc_feature 1..25: note = Oligonucleotide
  source 1..25: mol_type = other DNA
gcgccactgcactcctgcctgggct

SEQ ID NO: 28791 - DNA, 25 bp, synthetic construct
  misc_feature 1..25: note = Oligonucleotide
  source 1..25: mol_type = other DNA
atcgcgccactgcactcctgcctgg

SEQ ID NO: 28792 - DNA, 25 bp, synthetic construct
  misc_feature 1..25: note = Oligonucleotide
  source 1..25: mol_type = other DNA
aagatcgcgccactgcactcctgcc

SEQ ID NO: 28793 - DNA, 25 bp, synthetic construct
  misc_feature 1..25: note = Oligonucleotide
  source 1..25: mol_type = other DNA
gccaagatcgcgccactgcactcct

SEQ ID NO: 28794 - DNA, 25 bp, synthetic construct
  misc_feature 1..25: note = Oligonucleotide
  source 1..25: mol_type = other DNA
tgagccaagatcgcgccactgcact

SEQ ID NO: 28795 - DNA, 25 bp, synthetic construct
  misc_feature 1..25: note = Oligonucleotide
  source 1..25: mol_type = other DNA
cagtgagccaagatcgcgccactgc

SEQ ID NO: 28796 - DNA, 25 bp, synthetic construct
  misc_feature 1..25: note = Oligonucleotide
  source 1..25: mol_type = other DNA
ttgcagtgagccaagatcgcgccac

SEQ ID NO: 28797 - DNA, 25 bp, synthetic construct
  misc_feature 1..25: note = Oligonucleotide
  source 1..25: mol_type = other DNA
agcttgcagtgagccaagatcgcgc

SEQ ID NO: 28798 - DNA, 25 bp, synthetic construct
  misc_feature 1..25: note = Oligonucleotide
  source 1..25: mol_type = other DNA
cggagcttgcagtgagccaagatcg

SEQ ID NO: 28799 - DNA, 25 bp, synthetic construct
  misc_feature 1..25: note = Oligonucleotide
  source 1..25: mol_type = other DNA
aggcggagcttgcagtgagccaaga

SEQ ID NO: 28800 - DNA, 25 bp, synthetic construct
  misc_feature 1..25: note = Oligonucleotide
  source 1..25: mol_type = other DNA
aggaggcggagcttgcagtgagcca

SEQ ID NO: 28801 - DNA, 25 bp, synthetic construct
  misc_feature 1..25: note = Oligonucleotide
  source 1..25: mol_type = other DNA
cccaggaggcggagcttgcagtgag

SEQ ID NO: 28802 - DNA, 25 bp, synthetic construct
  misc_feature 1..25: note = Oligonucleotide
  source 1..25: mol_type = other DNA
gaacccaggaggcggagcttgcagt

SEQ ID NO: 28803 - DNA, 25 bp, synthetic construct
  misc_feature 1..25: note = Oligonucleotide
  source 1..25: mol_type = other DNA
tgagaacccaggaggcggagcttgc

SEQ ID NO: 28804 - DNA, 25 bp, synthetic construct
  misc_feature 1..25: note = Oligonucleotide
  source 1..25: mol_type = other DNA
tggtgagaacccaggaggcggagct

SEQ ID NO: 28805 - DNA, 25 bp, synthetic construct
  misc_feature 1..25: note = Oligonucleotide
  source 1..25: mol_type = other DNA
gaatggtgagaacccaggaggcgga

SEQ ID NO: 28806 - DNA, 25 bp, synthetic construct
  misc_feature 1..25: note = Oligonucleotide
  source 1..25: mol_type = other DNA
ggagaatggtgagaacccaggaggc

SEQ ID NO: 28807 - DNA, 25 bp, synthetic construct
  misc_feature 1..25: note = Oligonucleotide
  source 1..25: mol_type = other DNA
gcaggagaatggtgagaacccagga

SEQ ID NO: 28808 - DNA, 25 bp, synthetic construct
  misc_feature 1..25: note = Oligonucleotide
  source 1..25: mol_type = other DNA
gaggcaggagaatggtgagaaccca

SEQ ID NO: 28809 - DNA, 25 bp, synthetic construct
  misc_feature 1..25: note = Oligonucleotide
  source 1..25: mol_type = other DNA
gctgaggcaggagaatggtgagaac

SEQ ID NO: 28810 - DNA, 25 bp, synthetic construct
  misc_feature 1..25: note = Oligonucleotide
  source 1..25: mol_type = other DNA
gaggctgaggcaggagaatggtgag

SEQ ID NO: 28811 - DNA, 25 bp, synthetic construct
  misc_feature 1..25: note = Oligonucleotide
  source 1..25: mol_type = other DNA
cgggaggctgaggcaggagaatggt

SEQ ID NO: 28812 - DNA, 25 bp, synthetic construct
  misc_feature 1..25: note = Oligonucleotide
  source 1..25: mol_type = other DNA
actcgggaggctgaggcaggagaat

SEQ ID NO: 28813 - DNA, 25 bp, synthetic construct
  misc_feature 1..25: note = Oligonucleotide
  source 1..25: mol_type = other DNA
gctactcgggaggctgaggcaggag

SEQ ID NO: 28814 - DNA, 25 bp, synthetic construct
  misc_feature 1..25: note = Oligonucleotide
  source 1..25: mol_type = other DNA
ccagctactcgggaggctgaggcag

SEQ ID NO: 28815 - DNA, 25 bp, synthetic construct
  misc_feature 1..25: note = Oligonucleotide
  source 1..25: mol_type = other DNA
atcccagctactcgggaggctgagg

SEQ ID NO: 28816 - DNA, 25 bp, synthetic construct
  misc_feature 1..25: note = Oligonucleotide
  source 1..25: mol_type = other DNA
gtaatcccagctactcgggaggctg

SEQ ID NO: 28817 - DNA, 25 bp, synthetic construct
  misc_feature 1..25: note = Oligonucleotide
  source 1..25: mol_type = other DNA
cctgtaatcccagctactcgggagg

SEQ ID NO: 28818 - DNA, 25 bp, synthetic construct
  misc_feature 1..25: note = Oligonucleotide
  source 1..25: mol_type = other DNA
gcacctgtaatcccagctactcggg

SEQ ID NO: 28819 - DNA, 25 bp, synthetic construct
  misc_feature 1..25: note = Oligonucleotide
  source 1..25: mol_type = other DNA
tgggcacctgtaatcccagctactc

SEQ ID NO: 28820 - DNA, 25 bp, synthetic construct
  misc_feature 1..25: note = Oligonucleotide
  source 1..25: mol_type = other DNA
tggtgggcacctgtaatcccagcta

SEQ ID NO: 28821 - DNA, 25 bp, synthetic construct
  misc_feature 1..25: note = Oligonucleotide
  source 1..25: mol_type = other DNA
tgatggtgggcacctgtaatcccag

SEQ ID NO: 28822 - DNA, 25 bp, synthetic construct
  misc_feature 1..25: note = Oligonucleotide
  source 1..25: mol_type = other DNA
gcatgatggtgggcacctgtaatcc

SEQ ID NO: 28823 - DNA, 25 bp, synthetic construct
  misc_feature 1..25: note = Oligonucleotide
  source 1..25: mol_type = other DNA
caggcatgatggtgggcacctgtaa

SEQ ID NO: 28824 - DNA, 25 bp, synthetic construct
  misc_feature 1..25: note = Oligonucleotide
  source 1..25: mol_type = other DNA
agccaggcatgatggtgggcacctg

SEQ ID NO: 28825 - DNA, 25 bp, synthetic construct
  misc_feature 1..25: note = Oligonucleotide
  source 1..25: mol_type = other DNA
attagccaggcatgatggtgggcac

SEQ ID NO: 28826 - DNA, 25 bp, synthetic construct
  misc_feature 1..25: note = Oligonucleotide
  source 1..25: mol_type = other DNA
aaaattagccaggcatgatggtggg

SEQ ID NO: 28827 - DNA, 25 bp, synthetic construct
  misc_feature 1..25: note = Oligonucleotide
  source 1..25: mol_type = other DNA
cagaaaattagccaggcatgatggt

SEQ ID NO: 28828 - DNA, 25 bp, synthetic construct
  misc_feature 1..25: note = Oligonucleotide
  source 1..25: mol_type = other DNA
atacagaaaattagccaggcatgat

SEQ ID NO: 28829 - DNA, 25 bp, synthetic construct
  misc_feature 1..25: note = Oligonucleotide
  source 1..25: mol_type = other DNA
aaaatacagaaaattagccaggcat

SEQ ID NO: 28830 - DNA, 25 bp, synthetic construct
  misc_feature 1..25: note = Oligonucleotide
  source 1..25: mol_type = other DNA
ctaaaaatacagaaaattagccagg

SEQ ID NO: 28831 - DNA, 25 bp, synthetic construct
  misc_feature 1..25: note = Oligonucleotide
  source 1..25: mol_type = other DNA
ctactaaaaatacagaaaattagcc

SEQ ID NO: 28832 - DNA, 25 bp, synthetic construct
  misc_feature 1..25: note = Oligonucleotide
  source 1..25: mol_type = other DNA
tctctactaaaaatacagaaaatta

SEQ ID NO: 28833 - DNA, 25 bp, synthetic construct
  misc_feature 1..25: note = Oligonucleotide
  source 1..25: mol_type = other DNA
ccgtctctactaaaaatacagaaaa

SEQ ID NO: 28834 - DNA, 25 bp, synthetic construct
  misc_feature 1..25: note = Oligonucleotide
  source 1..25: mol_type = other DNA
accccgtctctactaaaaatacaga

SEQ ID NO: 28835 - DNA, 25 bp, synthetic construct
  misc_feature 1..25: note = Oligonucleotide
  source 1..25: mol_type = other DNA
gaaaccccgtctctactaaaaatac

SEQ ID NO: 28836 - DNA, 25 bp, synthetic construct
  misc_feature 1..25: note = Oligonucleotide
  source 1..25: mol_type = other DNA
ggtgaaaccccgtctctactaaaaa

SEQ ID NO: 28837 - DNA, 25 bp, synthetic construct
  misc_feature 1..25: note = Oligonucleotide
  source 1..25: mol_type = other DNA
cacggtgaaaccccgtctctactaa

SEQ ID NO: 28838 - DNA, 25 bp, synthetic construct
  misc_feature 1..25: note = Oligonucleotide
  source 1..25: mol_type = other DNA
taacacggtgaaaccccgtctctac

SEQ ID NO: 28839 - DNA, 25 bp, synthetic construct
  misc_feature 1..25: note = Oligonucleotide
  source 1..25: mol_type = other DNA
ggctaacacggtgaaaccccgtctc

SEQ ID NO: 28840 - DNA, 25 bp, synthetic construct
  misc_feature 1..25: note = Oligonucleotide
  source 1..25: mol_type = other DNA
cctggctaacacggtgaaaccccgt

SEQ ID NO: 28841 - DNA, 25 bp, synthetic construct
  misc_feature 1..25: note = Oligonucleotide
  source 1..25: mol_type = other DNA
catcctggctaacacggtgaaaccc

SEQ ID NO: 28842 - DNA, 25 bp, synthetic construct
  misc_feature 1..25: note = Oligonucleotide
  source 1..25: mol_type = other DNA
gaccatcctggctaacacggtgaaa

SEQ ID NO: 28843 - DNA, 25 bp, synthetic construct
  misc_feature 1..25: note = Oligonucleotide
  source 1..25: mol_type = other DNA
caagaccatcctggctaacacggtg

SEQ ID NO: 28844 - DNA, 25 bp, synthetic construct
  misc_feature 1..25: note = Oligonucleotide
  source 1..25: mol_type = other DNA
gatcaagaccatcctggctaacacg

SEQ ID NO: 28845 - DNA, 25 bp, synthetic construct
  misc_feature 1..25: note = Oligonucleotide
  source 1..25: mol_type = other DNA
ggagatcaagaccatcctggctaac

SEQ ID NO: 28846 - DNA, 25 bp, synthetic construct
  misc_feature 1..25: note = Oligonucleotide
  source 1..25: mol_type = other DNA
tcaggagatcaagaccatcctggct

SEQ ID NO: 28847 - DNA, 25 bp, synthetic construct
  misc_feature 1..25: note = Oligonucleotide
  source 1..25: mol_type = other DNA
aggtcaggagatcaagaccatcctg

SEQ ID NO: 28848 - DNA, 25 bp, synthetic construct
  misc_feature 1..25: note = Oligonucleotide
  source 1..25: mol_type = other DNA
acgaggtcaggagatcaagaccatc

SEQ ID NO: 28849 - DNA, 25 bp, synthetic construct
  misc_feature 1..25: note = Oligonucleotide
  source 1..25: mol_type = other DNA
atcacgaggtcaggagatcaagacc

SEQ ID NO: 28850 - DNA, 25 bp, synthetic construct
  misc_feature 1..25: note = Oligonucleotide
  source 1..25: mol_type = other DNA
tggatcacgaggtcaggagatcaag

SEQ ID NO: 28851 - DNA, 25 bp, synthetic construct
  misc_feature 1..25: note = Oligonucleotide
  source 1..25: mol_type = other DNA
gggtggatcacgaggtcaggagatc

SEQ ID NO: 28852 - DNA, 25 bp, synthetic construct
  misc_feature 1..25: note = Oligonucleotide
  source 1..25: mol_type = other DNA
ggcgggtggatcacgaggtcaggag

SEQ ID NO: 28853 - DNA, 25 bp, synthetic construct
  misc_feature 1..25: note = Oligonucleotide
  source 1..25: mol_type = other DNA
cgaggcgggtggatcacgaggtcag

SEQ ID NO: 28854 - DNA, 25 bp, synthetic construct
  misc_feature 1..25: note = Oligonucleotide
  source 1..25: mol_type = other DNA
agccgaggcgggtggatcacgaggt

SEQ ID NO: 28855 - DNA, 25 bp, synthetic construct
  misc_feature 1..25: note = Oligonucleotide
  source 1..25: mol_type = other DNA
ggaagccgaggcgggtggatcacga

SEQ ID NO: 28856 - DNA, 25 bp, synthetic construct
  misc_feature 1..25: note = Oligonucleotide
  source 1..25: mol_type = other DNA
ttgggaagccgaggcgggtggatca

SEQ ID NO: 28857 - DNA, 25 bp, synthetic construct
  misc_feature 1..25: note = Oligonucleotide
  source 1..25: mol_type = other DNA
actttgggaagccgaggcgggtgga

SEQ ID NO: 28858 - DNA, 25 bp, synthetic construct
  misc_feature 1..25: note = Oligonucleotide
  source 1..25: mol_type = other DNA
agcactttgggaagccgaggcgggt

SEQ ID NO: 28859 - DNA, 25 bp, synthetic construct
  misc_feature 1..25: note = Oligonucleotide
  source 1..25: mol_type = other DNA
cccagcactttgggaagccgaggcg

SEQ ID NO: 28860 - DNA, 25 bp, synthetic construct
  misc_feature 1..25: note = Oligonucleotide
  source 1..25: mol_type = other DNA
aatcccagcactttgggaagccgag

SEQ ID NO: 28861 - DNA, 25 bp, synthetic construct
  misc_feature 1..25: note = Oligonucleotide
  source 1..25: mol_type = other DNA
tgtaatcccagcactttgggaagcc

SEQ ID NO: 28862 - DNA, 25 bp, synthetic construct
  misc_feature 1..25: note = Oligonucleotide
  source 1..25: mol_type = other DNA
gcctgtaatcccagcactttgggaa

SEQ ID NO: 28863 - DNA, 25 bp, synthetic construct
  misc_feature 1..25: note = Oligonucleotide
  source 1..25: mol_type = other DNA
catgcctgtaatcccagcactttgg

SEQ ID NO: 28864 - DNA, 25 bp, synthetic construct
  misc_feature 1..25: note = Oligonucleotide
  source 1..25: mol_type = other DNA
gctcatgcctgtaatcccagcactt

SEQ ID NO: 28865 - DNA, 25 bp, synthetic construct
  misc_feature 1..25: note = Oligonucleotide
  source 1..25: mol_type = other DNA
gtggctcatgcctgtaatcccagca

SEQ ID NO: 28866 - DNA, 25 bp, synthetic construct
  misc_feature 1..25: note = Oligonucleotide
  source 1..25: mol_type = other DNA
acagtggctcatgcctgtaatccca

SEQ ID NO: 28867 - DNA, 25 bp, synthetic construct
  misc_feature 1..25: note = Oligonucleotide
  source 1..25: mol_type = other DNA
ggcacagtggctcatgcctgtaatc

SEQ ID NO: 28868 - DNA, 25 bp, synthetic construct
  misc_feature 1..25: note = Oligonucleotide
  source 1..25: mol_type = other DNA
ccgggcacagtggctcatgcctgta

SEQ ID NO: 28869 - DNA, 25 bp, synthetic construct
  misc_feature 1..25: note = Oligonucleotide
  source 1..25: mol_type = other DNA
tggccgggcacagtggctcatgcct

SEQ ID NO: 28870 - DNA, 25 bp, synthetic construct
  misc_feature 1..25: note = Oligonucleotide
  source 1..25: mol_type = other DNA
ccctggccgggcacagtggctcatg

SEQ ID NO: 28871 - DNA, 25 bp, synthetic construct
  misc_feature 1..25: note = Oligonucleotide
  source 1..25: mol_type = other DNA
aggccctggccgggcacagtggctc

SEQ ID NO: 28872 - DNA, 25 bp, synthetic construct
  misc_feature 1..25: note = Oligonucleotide
  source 1..25: mol_type = other DNA
aggaggccctggccgggcacagtgg

SEQ ID NO: 28873 - DNA, 25 bp, synthetic construct
  misc_feature 1..25: note = Oligonucleotide
  source 1..25: mol_type = other DNA
aagaggaggccctggccgggcacag

SEQ ID NO: 28874 - DNA, 25 bp, synthetic construct
  misc_feature 1..25: note = Oligonucleotide
  source 1..25: mol_type = other DNA
cagaagaggaggccctggccgggca

SEQ ID NO: 28875 - DNA, 25 bp, synthetic construct
  misc_feature 1..25: note = Oligonucleotide
  source 1..25: mol_type = other DNA
aggcagaagaggaggccctggccgg

SEQ ID NO: 28876 - DNA, 25 bp, synthetic construct
  misc_feature 1..25: note = Oligonucleotide
  source 1..25: mol_type = other DNA
tataggcagaagaggaggccctggc

SEQ ID NO: 28877 - DNA, 25 bp, synthetic construct
  misc_feature 1..25: note = Oligonucleotide
  source 1..25: mol_type = other DNA
aattataggcagaagaggaggccct

SEQ ID NO: 28878 - DNA, 25 bp, synthetic construct
  misc_feature 1..25: note = Oligonucleotide
  source 1..25: mol_type = other DNA
gacaattataggcagaagaggaggc

SEQ ID NO: 28879 - DNA, 25 bp, synthetic construct
  misc_feature 1..25: note = Oligonucleotide
  source 1..25: mol_type = other DNA
ttagacaattataggcagaagagga

SEQ ID NO: 28880 - DNA, 25 bp, synthetic construct
  misc_feature 1..25: note = Oligonucleotide
  source 1..25: mol_type = other DNA
cggttagacaattataggcagaaga

SEQ ID NO: 28881 - DNA, 25 bp, synthetic construct
  misc_feature 1..25: note = Oligonucleotide
  source 1..25: mol_type = other DNA
ccacggttagacaattataggcaga

SEQ ID NO: 28882 - DNA, 25 bp, synthetic construct
  misc_feature 1..25: note = Oligonucleotide
  source 1..25: mol_type = other DNA
ttcccacggttagacaattataggc

SEQ ID NO: 28883 - DNA, 25 bp, synthetic construct
  misc_feature 1..25: note = Oligonucleotide
  source 1..25: mol_type = other DNA
gctttcccacggttagacaattata

SEQ ID NO: 28884 - DNA, 25 bp, synthetic construct
  misc_feature 1..25: note = Oligonucleotide
  source 1..25: mol_type = other DNA
acagctttcccacggttagacaatt

SEQ ID NO: 28885 - DNA, 25 bp, synthetic construct
  misc_feature 1..25: note = Oligonucleotide
  source 1..25: mol_type = other DNA
cagacagctttcccacggttagaca

SEQ ID NO: 28886 - DNA, 25 bp, synthetic construct
  misc_feature 1..25: note = Oligonucleotide
  source 1..25: mol_type = other DNA
tcccagacagctttcccacggttag

SEQ ID NO: 28887 - DNA, 25 bp, synthetic construct
  misc_feature 1..25: note = Oligonucleotide
  source 1..25: mol_type = other DNA
aggtcccagacagctttcccacggt

SEQ ID NO: 28888 - DNA, 25 bp, synthetic construct
  misc_feature 1..25: note = Oligonucleotide
  source 1..25: mol_type = other DNA
cagaggtcccagacagctttcccac

SEQ ID NO: 28889 - DNA, 25 bp, synthetic construct
  misc_feature 1..25: note = Oligonucleotide
  source 1..25: mol_type = other DNA
gcgcagaggtcccagacagctttcc

SEQ ID NO: 28890 - DNA, 25 bp, synthetic construct
  misc_feature 1..25: note = Oligonucleotide
  source 1..25: mol_type = other DNA
gaggcgcagaggtcccagacagctt

SEQ ID NO: 28891 - DNA, 25 bp, synthetic construct
  misc_feature 1..25: note = Oligonucleotide
  source 1..25: mol_type = other DNA
actgaggcgcagaggtcccagacag

SEQ ID NO: 28892 - DNA, 25 bp, synthetic construct
  misc_feature 1..25: note = Oligonucleotide
  source 1..25: mol_type = other DNA
gaaactgaggcgcagaggtcccaga

SEQ ID NO: 28893 - DNA, 25 bp, synthetic construct
  misc_feature 1..25: note = Oligonucleotide
  source 1..25: mol_type = other DNA
agagaaactgaggcgcagaggtccc

SEQ ID NO: 28894 - DNA, 25 bp, synthetic construct
  misc_feature 1..25: note = Oligonucleotide
  source 1..25: mol_type = other DNA
ttaagagaaactgaggcgcagaggt

SEQ ID NO: 28895 - DNA, 25 bp, synthetic construct
  misc_feature 1..25: note = Oligonucleotide
  source 1..25: mol_type = other DNA
cacttaagagaaactgaggcgcaga

SEQ ID NO: 28896 - DNA, 25 bp, synthetic construct
  misc_feature 1..25: note = Oligonucleotide
  source 1..25: mol_type = other DNA
tttcacttaagagaaactgaggcgc

SEQ ID NO: 28897 - DNA, 25 bp, synthetic construct
  misc_feature 1..25: note = Oligonucleotide
  source 1..25: mol_type = other DNA
atgtttcacttaagagaaactgagg

SEQ ID NO: 28898 - DNA, 25 bp, synthetic construct
  misc_feature 1..25: note = Oligonucleotide
  source 1..25: mol_type = other DNA
accatgtttcacttaagagaaactg

SEQ ID NO: 28899 - DNA, 25 bp, synthetic construct
  misc_feature 1..25: note = Oligonucleotide
  source 1..25: mol_type = other DNA
gagaccatgtttcacttaagagaaa

SEQ ID NO: 28900 - DNA, 25 bp, synthetic construct
  misc_feature 1..25: note = Oligonucleotide
  source 1..25: mol_type = other DNA
taagagaccatgtttcacttaagag

SEQ ID NO: 28901 - DNA, 25 bp, synthetic construct
  misc_feature 1..25: note = Oligonucleotide
  source 1..25: mol_type = other DNA
ccataagagaccatgtttcacttaa

SEQ ID NO: 28902 - DNA, 25 bp, synthetic construct
  misc_feature 1..25: note = Oligonucleotide
  source 1..25: mol_type = other DNA
tgaccataagagaccatgtttcact

SEQ ID NO: 28903 - DNA, 25 bp, synthetic construct
  misc_feature 1..25: note = Oligonucleotide
  source 1..25: mol_type = other DNA
aaatgaccataagagaccatgtttc

SEQ ID NO: 28904 - DNA, 25 bp, synthetic construct
  misc_feature 1..25: note = Oligonucleotide
  source 1..25: mol_type = other DNA
tgcaaatgaccataagagaccatgt

SEQ ID NO: 28905 - DNA, 25 bp, synthetic construct
  misc_feature 1..25: note = Oligonucleotide
  source 1..25: mol_type = other DNA
ggatgcaaatgaccataagagacca

SEQ ID NO: 28906 - DNA, 25 bp, synthetic construct
  misc_feature 1..25: note = Oligonucleotide
  source 1..25: mol_type = other DNA
aggggatgcaaatgaccataagaga

SEQ ID NO: 28907 - DNA, 25 bp, synthetic construct
  misc_feature 1..25: note = Oligonucleotide
  source 1..25: mol_type = other DNA
ggaaggggatgcaaatgaccataag

SEQ ID NO: 28908 - DNA, 25 bp, synthetic construct
  misc_feature 1..25: note = Oligonucleotide
  source 1..25: mol_type = other DNA
gggggaaggggatgcaaatgaccat

SEQ ID NO: 28909 - DNA, 25 bp, synthetic construct
  misc_feature 1..25: note = Oligonucleotide
  source 1..25: mol_type = other DNA
acagggggaaggggatgcaaatgac

SEQ ID NO: 28910 - DNA, 25 bp, synthetic construct
  misc_feature 1..25: note = Oligonucleotide
  source 1..25: mol_type = other DNA
accacagggggaaggggatgcaaat

SEQ ID NO: 28911 - DNA, 25 bp, synthetic construct
  misc_feature 1..25: note = Oligonucleotide
  source 1..25: mol_type = other DNA
gacaccacagggggaaggggatgca

SEQ ID NO: 28912 - DNA, 25 bp, synthetic construct
  misc_feature 1..25: note = Oligonucleotide
  source 1..25: mol_type = other DNA
caggacaccacagggggaaggggat

SEQ ID NO: 28913 - DNA, 25 bp, synthetic construct
  misc_feature 1..25: note = Oligonucleotide
  source 1..25: mol_type = other DNA
ccacaggacaccacagggggaaggg

SEQ ID NO: 28914 - DNA, 25 bp, synthetic construct
  misc_feature 1..25: note = Oligonucleotide
  source 1..25: mol_type = other DNA
acgccacaggacaccacagggggaa

SEQ ID NO: 28915 - DNA, 25 bp, synthetic construct
  misc_feature 1..25: note = Oligonucleotide
  source 1..25: mol_type = other DNA
caaacgccacaggacaccacagggg

SEQ ID NO: 28916 - DNA, 25 bp, synthetic construct
  misc_feature 1..25: note = Oligonucleotide
  source 1..25: mol_type = other DNA
gatcaaacgccacaggacaccacag

SEQ ID NO: 28917 - DNA, 25 bp, synthetic construct
  misc_feature 1..25: note = Oligonucleotide
  source 1..25: mol_type = other DNA
caggatcaaacgccacaggacacca

SEQ ID NO: 28918 - DNA, 25 bp, synthetic construct
  misc_feature 1..25: note = Oligonucleotide
  source 1..25: mol_type = other DNA
acccaggatcaaacgccacaggaca

SEQ ID NO: 28919 - DNA, 25 bp, synthetic construct
  misc_feature 1..25: note = Oligonucleotide
  source 1..25: mol_type = other DNA
cccacccaggatcaaacgccacagg

SEQ ID NO: 28920 - DNA, 25 bp, synthetic construct
  misc_feature 1..25: note = Oligonucleotide
  source 1..25: mol_type = other DNA
agccccacccaggatcaaacgccac

SEQ ID NO: 28921 - DNA, 25 bp, synthetic construct
  misc_feature 1..25: note = Oligonucleotide
  source 1..25: mol_type = other DNA
tccagccccacccaggatcaaacgc

SEQ ID NO: 28922 - DNA, 25 bp, synthetic construct
  misc_feature 1..25: note = Oligonucleotide
  source 1..25: mol_type = other DNA
gagtccagccccacccaggatcaaa

SEQ ID NO: 28923 - DNA, 25 bp, synthetic construct
  misc_feature 1..25: note = Oligonucleotide
  source 1..25: mol_type = other DNA
caagagtccagccccacccaggatc

SEQ ID NO: 28924 - DNA, 25 bp, synthetic construct
  misc_feature 1..25: note = Oligonucleotide
  source 1..25: mol_type = other DNA
cggcaagagtccagccccacccagg

SEQ ID NO: 28925 - DNA, 25 bp, synthetic construct
  misc_feature 1..25: note = Oligonucleotide
  source 1..25: mol_type = other DNA
caccggcaagagtccagccccaccc

SEQ ID NO: 28926 - DNA, 25 bp, synthetic construct
  misc_feature 1..25: note = Oligonucleotide
  source 1..25: mol_type = other DNA
ggccaccggcaagagtccagcccca

SEQ ID NO: 28927 - DNA, 25 bp, synthetic construct
  misc_feature 1..25: note = Oligonucleotide
  source 1..25: mol_type = other DNA
caaggccaccggcaagagtccagcc

SEQ ID NO: 28928 - DNA, 25 bp, synthetic construct
  misc_feature 1..25: note = Oligonucleotide
  source 1..25: mol_type = other DNA
gaccaaggccaccggcaagagtcca

SEQ ID NO: 28929 - DNA, 25 bp, synthetic construct
  misc_feature 1..25: note = Oligonucleotide
  source 1..25: mol_type = other DNA
ctagaccaaggccaccggcaagagt

SEQ ID NO: 28930 - DNA, 25 bp, synthetic construct
  misc_feature 1..25: note = Oligonucleotide
  source 1..25: mol_type = other DNA
caactagaccaaggccaccggcaag

SEQ ID NO: 28931 - DNA, 25 bp, synthetic construct
  misc_feature 1..25: note = Oligonucleotide
  source 1..25: mol_type = other DNA
aagcaactagaccaaggccaccggc

SEQ ID NO: 28932 - DNA, 25 bp, synthetic construct
  misc_feature 1..25: note = Oligonucleotide
  source 1..25: mol_type = other DNA
tccaagcaactagaccaaggccacc

SEQ ID NO: 28933 - DNA, 25 bp, synthetic construct
  misc_feature 1..25: note = Oligonucleotide
  source 1..25: mol_type = other DNA
ccctccaagcaactagaccaaggcc

SEQ ID NO: 28934 - DNA, 25 bp, synthetic construct
  misc_feature 1..25: note = Oligonucleotide
  source 1..25: mol_type = other DNA
cctccctccaagcaactagaccaag

SEQ ID NO: 28935 - DNA, 25 bp, synthetic construct
  misc_feature 1..25: note = Oligonucleotide
  source 1..25: mol_type = other DNA
cgccctccctccaagcaactagacc

SEQ ID NO: 28936 - DNA, 25 bp, synthetic construct
  misc_feature 1..25: note = Oligonucleotide
  source 1..25: mol_type = other DNA
tcccgccctccctccaagcaactag

SEQ ID NO: 28937 - DNA, 25 bp, synthetic construct
  misc_feature 1..25: note = Oligonucleotide
  source 1..25: mol_type = other DNA
ccttcccgccctccctccaagcaac

SEQ ID NO: 28938 - DNA, 25 bp, synthetic construct
  misc_feature 1..25: note = Oligonucleotide
  source 1..25: mol_type = other DNA
gggccttcccgccctccctccaagc

SEQ ID NO: 28939 - DNA, 25 bp, synthetic construct
  misc_feature 1..25: note = Oligonucleotide
  source 1..25: mol_type = other DNA
atggggccttcccgccctccctcca

SEQ ID NO: 28940 - DNA, 25 bp, synthetic construct
  misc_feature 1..25: note = Oligonucleotide
  source 1..25: mol_type = other DNA
cagatggggccttcccgccctccct

SEQ ID NO: 28941 - DNA, 25 bp, synthetic construct
  misc_feature 1..25: note = Oligonucleotide
  source 1..25: mol_type = other DNA
gggcagatggggccttcccgccctc

SEQ ID NO: 28942 - DNA, 25 bp, synthetic construct
  misc_feature 1..25: note = Oligonucleotide
  source 1..25: mol_type = other DNA
gaggggcagatggggccttcccgcc

SEQ ID NO: 28943 - DNA, 25 bp, synthetic construct
  misc_feature 1..25: note = Oligonucleotide
  source 1..25: mol_type = other DNA
gatgaggggcagatggggccttccc

SEQ ID NO: 28944 - DNA, 25 bp, synthetic construct
  misc_feature 1..25: note = Oligonucleotide
  source 1..25: mol_type = other DNA
acagatgaggggcagatggggcctt

SEQ ID NO: 28945 - DNA, 25 bp, synthetic construct
  misc_feature 1..25: note = Oligonucleotide
  source 1..25: mol_type = other DNA
cgcacagatgaggggcagatggggc

SEQ ID NO: 28946 - DNA, 25 bp, synthetic construct
  misc_feature 1..25: note = Oligonucleotide
  source 1..25: mol_type = other DNA
caacgcacagatgaggggcagatgg

SEQ ID NO: 28947 - DNA, 25 bp, synthetic construct
  misc_feature 1..25: note = Oligonucleotide
  source 1..25: mol_type = other DNA
ccacaacgcacagatgaggggcaga

SEQ ID NO: 28948 - DNA, 25 bp, synthetic construct
  misc_feature 1..25: note = Oligonucleotide
  source 1..25: mol_type = other DNA
tgtccacaacgcacagatgaggggc

SEQ ID NO: 28949 - DNA, 25 bp, synthetic construct
  misc_feature 1..25: note = Oligonucleotide
  source 1..25: mol_type = other DNA
atctgtccacaacgcacagatgagg

SEQ ID NO: 28950 - DNA, 25 bp, synthetic construct
  misc_feature 1..25: note = Oligonucleotide
  source 1..25: mol_type = other DNA
ggtatctgtccacaacgcacagatg

SEQ ID NO: 28951 - DNA, 25 bp, synthetic construct
  misc_feature 1..25: note = Oligonucleotide
  source 1..25: mol_type = other DNA
tggggtatctgtccacaacgcacag

SEQ ID NO: 28952 - DNA, 25 bp, synthetic construct
  misc_feature 1..25: note = Oligonucleotide
  source 1..25: mol_type = other DNA
ccctggggtatctgtccacaacgca

SEQ ID NO: 28953 - DNA, 25 bp, synthetic construct
  misc_feature 1..25: note = Oligonucleotide
  source 1..25: mol_type = other DNA
gagccctggggtatctgtccacaac

SEQ ID NO: 28954 - DNA, 25 bp, synthetic construct
  misc_feature 1..25: note = Oligonucleotide
  source 1..25: mol_type = other DNA
caagagccctggggtatctgtccac

SEQ ID NO: 28955 - DNA, 25 bp, synthetic construct
  misc_feature 1..25: note = Oligonucleotide
  source 1..25: mol_type = other DNA
ctccaagagccctggggtatctgtc

SEQ ID NO: 28956 - DNA, 25 bp, synthetic construct
  misc_feature 1..25: note = Oligonucleotide
  source 1..25: mol_type = other DNA
tgactccaagagccctggggtatct

SEQ ID NO: 28957 - DNA, 25 bp, synthetic construct
  misc_feature 1..25: note = Oligonucleotide
  source 1..25: mol_type = other DNA
tggtgactccaagagccctggggta

SEQ ID NO: 28958 - DNA, 25 bp, synthetic construct
  misc_feature 1..25: note = Oligonucleotide
  source 1..25: mol_type = other DNA
ccatggtgactccaagagccctggg

SEQ ID NO: 28959 - DNA, 25 bp, synthetic construct
  misc_feature 1..25: note = Oligonucleotide
  source 1..25: mol_type = other DNA
caaccatggtgactccaagagccct

SEQ ID NO: 28960 - DNA, 25 bp, synthetic construct
  misc_feature 1..25: note = Oligonucleotide
  source 1..25: mol_type = other DNA
tcgcaaccatggtgactccaagagc

SEQ ID NO: 28961 - DNA, 25 bp, synthetic construct
  misc_feature 1..25: note = Oligonucleotide
  source 1..25: mol_type = other DNA
aagtcgcaaccatggtgactccaag

SEQ ID NO: 28962 - DNA, 25 bp, synthetic construct
  misc_feature 1..25: note = Oligonucleotide
  source 1..25: mol_type = other DNA
agtaagtcgcaaccatggtgactcc

SEQ ID NO: 28963 - DNA, 25 bp, synthetic construct
  misc_feature 1..25: note = Oligonucleotide
  source 1..25: mol_type = other DNA
gccagtaagtcgcaaccatggtgac

SEQ ID NO: 28964 - DNA, 25 bp, synthetic construct
  misc_feature 1..25: note = Oligonucleotide
  source 1..25: mol_type = other DNA
atagccagtaagtcgcaaccatggt

SEQ ID NO: 28965 - DNA, 25 bp, synthetic construct
  misc_feature 1..25: note = Oligonucleotide
  source 1..25: mol_type = other DNA
tggatagccagtaagtcgcaaccat

SEQ ID NO: 28966 - DNA, 25 bp, synthetic construct
  misc_feature 1..25: note = Oligonucleotide
  source 1..25: mol_type = other DNA
ggttggatagccagtaagtcgcaac

SEQ ID NO: 28967 - DNA, 25 bp, synthetic construct
  misc_feature 1..25: note = Oligonucleotide
  source 1..25: mol_type = other DNA
ctaggttggatagccagtaagtcgc

SEQ ID NO: 28968 - DNA, 25 bp, synthetic construct
  misc_feature 1..25: note = Oligonucleotide
  source 1..25: mol_type = other DNA
cacctaggttggatagccagtaagt

SEQ ID NO: 28969 - DNA, 25 bp, synthetic construct
  misc_feature 1..25: note = Oligonucleotide
  source 1..25: mol_type = other DNA
gcacacctaggttggatagccagta

SEQ ID NO: 28970 - DNA, 25 bp, synthetic construct
  misc_feature 1..25: note = Oligonucleotide
  source 1..25: mol_type = other DNA
caagcacacctaggttggatagcca

SEQ ID NO: 28971 - DNA, 25 bp, synthetic construct
  misc_feature 1..25: note = Oligonucleotide
  source 1..25: mol_type = other DNA
aagcaagcacacctaggttggatag

SEQ ID NO: 28972 - DNA, 25 bp, synthetic construct
  misc_feature 1..25: note = Oligonucleotide
  source 1..25: mol_type = other DNA
accaagcaagcacacctaggttgga

SEQ ID NO: 28973 - DNA, 25 bp, synthetic construct
  misc_feature 1..25: note = Oligonucleotide
  source 1..25: mol_type = other DNA
ccaaccaagcaagcacacctaggtt

SEQ ID NO: 28974 - DNA, 25 bp, synthetic construct
  misc_feature 1..25: note = Oligonucleotide
  source 1..25: mol_type = other DNA
actccaaccaagcaagcacacctag

SEQ ID NO: 28975 - DNA, 25 bp, synthetic construct
  misc_feature 1..25: note = Oligonucleotide
  source 1..25: mol_type = other DNA
ctaactccaaccaagcaagcacacc

SEQ ID NO: 28976 - DNA, 25 bp, synthetic construct
  misc_feature 1..25: note = Oligonucleotide
  source 1..25: mol_type = other DNA
tgtctaactccaaccaagcaagcac

SEQ ID NO: 28977 - DNA, 25 bp, synthetic construct
  misc_feature 1..25: note = Oligonucleotide
  source 1..25: mol_type = other DNA
gtgtgtctaactccaaccaagcaag

SEQ ID NO: 28978 - DNA, 25 bp, synthetic construct
  misc_feature 1..25: note = Oligonucleotide
  source 1..25: mol_type = other DNA
gacgtgtgtctaactccaaccaagc

SEQ ID NO: 28979 - DNA, 25 bp, synthetic construct
  misc_feature 1..25: note = Oligonucleotide
  source 1..25: mol_type = other DNA
agggacgtgtgtctaactccaacca

SEQ ID NO: 28980 - DNA, 25 bp, synthetic construct
  misc_feature 1..25: note = Oligonucleotide
  source 1..25: mol_type = other DNA
ctgagggacgtgtgtctaactccaa

SEQ ID NO: 28981 - DNA, 25 bp, synthetic construct
  misc_feature 1..25: note = Oligonucleotide
  source 1..25: mol_type = other DNA
ccactgagggacgtgtgtctaactc

SEQ ID NO: 28982 - DNA, 25 bp, synthetic construct
  misc_feature 1..25: note = Oligonucleotide
  source 1..25: mol_type = other DNA
ttaccactgagggacgtgtgtctaa

SEQ ID NO: 28983 - DNA, 25 bp, synthetic construct
  misc_feature 1..25: note = Oligonucleotide
  source 1..25: mol_type = other DNA
tccttaccactgagggacgtgtgtc

SEQ ID NO: 28984 - DNA, 25 bp, synthetic construct
  misc_feature 1..25: note = Oligonucleotide
  source 1..25: mol_type = other DNA
tgctccttaccactgagggacgtgt

SEQ ID NO: 28985 - DNA, 25 bp, synthetic construct
  misc_feature 1..25: note = Oligonucleotide
  source 1..25: mol_type = other DNA
gcctgctccttaccactgagggacg

SEQ ID NO: 28986 - DNA, 25 bp, synthetic construct
  misc_feature 1..25: note = Oligonucleotide
  source 1..25: mol_type = other DNA
ggtgcctgctccttaccactgaggg

SEQ ID NO: 28987 - DNA, 25 bp, synthetic construct
  misc_feature 1..25: note = Oligonucleotide
  source 1..25: mol_type = other DNA
acaggtgcctgctccttaccactga

SEQ ID NO: 28988 - DNA, 25 bp, synthetic construct
  misc_feature 1..25: note = Oligonucleotide
  source 1..25: mol_type = other DNA
gacacaggtgcctgctccttaccac

SEQ ID NO: 28989 - DNA, 25 bp, synthetic construct
  misc_feature 1..25: note = Oligonucleotide
  source 1..25: mol_type = other DNA
actgacacaggtgcctgctccttac

SEQ ID NO: 28990 - DNA, 25 bp, synthetic construct
  misc_feature 1..25: note = Oligonucleotide
  source 1..25: mol_type = other DNA
tgaactgacacaggtgcctgctcct

SEQ ID NO: 28991 - DNA, 25 bp, synthetic construct
  misc_feature 1..25: note = Oligonucleotide
  source 1..25: mol_type = other DNA
ggatgaactgacacaggtgcctgct

SEQ ID NO: 28992 - DNA, 25 bp, synthetic construct
  misc_feature 1..25: note = Oligonucleotide
  source 1..25: mol_type = other DNA
tcaggatgaactgacacaggtgcct

SEQ ID NO: 28993 - DNA, 25 bp, synthetic construct
  misc_feature 1..25: note = Oligonucleotide
  source 1..25: mol_type = other DNA
acatcaggatgaactgacacaggtg

SEQ ID NO: 28994 - DNA, 25 bp, synthetic construct
  misc_feature 1..25: note = Oligonucleotide
  source 1..25: mol_type = other DNA
accacatcaggatgaactgacacag

SEQ ID NO: 28995 - DNA, 25 bp, synthetic construct
  misc_feature 1..25: note = Oligonucleotide
  source 1..25: mol_type = other DNA
acgaccacatcaggatgaactgaca

SEQ ID NO: 28996 - DNA, 25 bp, synthetic construct
  misc_feature 1..25: note = Oligonucleotide
  source 1..25: mol_type = other DNA
ccgacgaccacatcaggatgaactg

SEQ ID NO: 28997 - DNA, 25 bp, synthetic construct
  misc_feature 1..25: note = Oligonucleotide
  source 1..25: mol_type = other DNA
gagccgacgaccacatcaggatgaa

SEQ ID NO: 28998 - DNA, 25 bp, synthetic construct
  misc_feature 1..25: note = Oligonucleotide
  source 1..25: mol_type = other DNA
atggagccgacgaccacatcaggat

SEQ ID NO: 28999 - DNA, 25 bp, synthetic construct
  misc_feature 1..25: note = Oligonucleotide
  source 1..25: mol_type = other DNA
cccatggagccgacgaccacatcag

SEQ ID NO: 29000 - DNA, 25 bp, synthetic construct
  misc_feature 1..25: note = Oligonucleotide
  source 1..25: mol_type = other DNA
tggcccatggagccgacgaccacat

SEQ ID NO: 29001 - DNA, 25 bp, synthetic construct
  misc_feature 1..25: note = Oligonucleotide
  source 1..25: mol_type = other DNA
tgttggcccatggagccgacgacca

SEQ ID NO: 29002 - DNA, 25 bp, synthetic construct
  misc_feature 1..25: note = Oligonucleotide
  source 1..25: mol_type = other DNA
tgttgttggcccatggagccgacga

SEQ ID NO: 29003 - DNA, 25 bp, synthetic construct
  misc_feature 1..25: note = Oligonucleotide
  source 1..25: mol_type = other DNA
gggtgttgttggcccatggagccga

SEQ ID NO: 29004 - DNA, 25 bp, synthetic construct
  misc_feature 1..25: note = Oligonucleotide
  source 1..25: mol_type = other DNA
taagggtgttgttggcccatggagc

SEQ ID NO: 29005 - DNA, 25 bp, synthetic construct
  misc_feature 1..25: note = Oligonucleotide
  source 1..25: mol_type = other DNA
aggtaagggtgttgttggcccatgg

SEQ ID NO: 29006 - DNA, 25 bp, synthetic construct
  misc_feature 1..25: note = Oligonucleotide
  source 1..25: mol_type = other DNA
atcaggtaagggtgttgttggccca

SEQ ID NO: 29007 - DNA, 25 bp, synthetic construct
  misc_feature 1..25: note = Oligonucleotide
  source 1..25: mol_type = other DNA
ctgatcaggtaagggtgttgttggc

SEQ ID NO: 29008 - DNA, 25 bp, synthetic construct
  misc_feature 1..25: note = Oligonucleotide
  source 1..25: mol_type = other DNA
cacctgatcaggtaagggtgttgtt

SEQ ID NO: 29009 - DNA, 25 bp, synthetic construct
  misc_feature 1..25: note = Oligonucleotide
  source 1..25: mol_type = other DNA
tggcacctgatcaggtaagggtgtt

SEQ ID NO: 29010 - DNA, 25 bp, synthetic construct
  misc_feature 1..25: note = Oligonucleotide
  source 1..25: mol_type = other DNA
gtgtggcacctgatcaggtaagggt

SEQ ID NO: 29011 - DNA, 25 bp, synthetic construct
  misc_feature 1..25: note = Oligonucleotide
  source 1..25: mol_type = other DNA
tgtgtgtggcacctgatcaggtaag

SEQ ID NO: 29012 - DNA, 25 bp, synthetic construct
  misc_feature 1..25: note = Oligonucleotide
  source 1..25: mol_type = other DNA
gtctgtgtgtggcacctgatcaggt

SEQ ID NO: 29013 - DNA, 25 bp, synthetic construct
  misc_feature 1..25: note = Oligonucleotide
  source 1..25: mol_type = other DNA
agtgtctgtgtgtggcacctgatca

SEQ ID NO: 29014 - DNA, 25 bp, synthetic construct
  misc_feature 1..25: note = Oligonucleotide
  source 1..25: mol_type = other DNA
cctagtgtctgtgtgtggcacctga

SEQ ID NO: 29015 - DNA, 25 bp, synthetic construct
  misc_feature 1..25: note = Oligonucleotide
  source 1..25: mol_type = other DNA
caccctagtgtctgtgtgtggcacc

SEQ ID NO: 29016 - DNA, 25 bp, synthetic construct
  misc_feature 1..25: note = Oligonucleotide
  source 1..25: mol_type = other DNA
tgtcaccctagtgtctgtgtgtggc

SEQ ID NO: 29017 - DNA, 25 bp, synthetic construct
  misc_feature 1..25: note = Oligonucleotide
  source 1..25: mol_type = other DNA
cggtgtcaccctagtgtctgtgtgt

SEQ ID NO: 29018 - DNA, 25 bp, synthetic construct
  misc_feature 1..25: note = Oligonucleotide
  source 1..25: mol_type = other DNA
tggcggtgtcaccctagtgtctgtg

SEQ ID NO: 29019 - DNA, 25 bp, synthetic construct
  misc_feature 1..25: note = Oligonucleotide
  source 1..25: mol_type = other DNA
atctggcggtgtcaccctagtgtct

SEQ ID NO: 29020 - DNA, 25 bp, synthetic construct
  misc_feature 1..25: note = Oligonucleotide
  source 1..25: mol_type = other DNA
gaaatctggcggtgtcaccctagtg

SEQ ID NO: 29021 - DNA, 25 bp, synthetic construct
  misc_feature 1..25: note = Oligonucleotide
  source 1..25: mol_type = other DNA
agggaaatctggcggtgtcacccta

SEQ ID NO: 29022 - DNA, 25 bp, synthetic construct
  misc_feature 1..25: note = Oligonucleotide
  source 1..25: mol_type = other DNA
ctcagggaaatctggcggtgtcacc

SEQ ID NO: 29023 - DNA, 25 bp, synthetic construct
  misc_feature 1..25: note = Oligonucleotide
  source 1..25: mol_type = other DNA
gtactcagggaaatctggcggtgtc

SEQ ID NO: 29024 - DNA, 25 bp, synthetic construct
  misc_feature 1..25: note = Oligonucleotide
  source 1..25: mol_type = other DNA
cctgtactcagggaaatctggcggt

SEQ ID NO: 29025 - DNA, 25 bp, synthetic construct
  misc_feature 1..25: note = Oligonucleotide
  source 1..25: mol_type = other DNA
ctgcctgtactcagggaaatctggc

SEQ ID NO: 29026 - DNA, 25 bp, synthetic construct
  misc_feature 1..25: note = Oligonucleotide
  source 1..25: mol_type = other DNA
atgctgcctgtactcagggaaatct

SEQ ID NO: 29027 - DNA, 25 bp, synthetic construct
  misc_feature 1..25: note = Oligonucleotide
  source 1..25: mol_type = other DNA
aatatgctgcctgtactcagggaaa

SEQ ID NO: 29028 - DNA, 25 bp, synthetic construct
  misc_feature 1..25: note = Oligonucleotide
  source 1..25: mol_type = other DNA
acaaatatgctgcctgtactcaggg

SEQ ID NO: 29029 - DNA, 25 bp, synthetic construct
  misc_feature 1..25: note = Oligonucleotide
  source 1..25: mol_type = other DNA
ctgacaaatatgctgcctgtactca

SEQ ID NO: 29030 - DNA, 25 bp, synthetic construct
  misc_feature 1..25: note = Oligonucleotide
  source 1..25: mol_type = other DNA
atcctgacaaatatgctgcctgtac

SEQ ID NO: 29031 - DNA, 25 bp, synthetic construct
  misc_feature 1..25: note = Oligonucleotide
  source 1..25: mol_type = other DNA
taaatcctgacaaatatgctgcctg

SEQ ID NO: 29032 - DNA, 25 bp, synthetic construct
  misc_feature 1..25: note = Oligonucleotide
  source 1..25: mol_type = other DNA
tattaaatcctgacaaatatgctgc

SEQ ID NO: 29033 - DNA, 25 bp, synthetic construct
  misc_feature 1..25: note = Oligonucleotide
  source 1..25: mol_type = other DNA
ttgtattaaatcctgacaaatatgc

SEQ ID NO: 29034 - DNA, 25 bp, synthetic construct
  misc_feature 1..25: note = Oligonucleotide
  source 1..25: mol_type = other DNA
ggcttgtattaaatcctgacaaata

SEQ ID NO: 29035 - DNA, 25 bp, synthetic construct
  misc_feature 1..25: note = Oligonucleotide
  source 1..25: mol_type = other DNA
aggggcttgtattaaatcctgacaa

SEQ ID NO: 29036 - DNA, 25 bp, synthetic construct
  misc_feature 1..25: note = Oligonucleotide
  source 1..25: mol_type = other DNA
ataaggggcttgtattaaatcctga

SEQ ID NO: 29037 - DNA, 25 bp, synthetic construct
  misc_feature 1..25: note = Oligonucleotide
  source 1..25: mol_type = other DNA
gagataaggggcttgtattaaatcc

SEQ ID NO: 29038 - DNA, 25 bp, synthetic construct
  misc_feature 1..25: note = Oligonucleotide
  source 1..25: mol_type = other DNA
attgagataaggggcttgtattaaa

SEQ ID NO: 29039 - DNA, 25 bp, synthetic construct
  misc_feature 1..25: note = Oligonucleotide
  source 1..25: mol_type = other DNA
caaattgagataaggggcttgtatt

SEQ ID NO: 29040 - DNA, 25 bp, synthetic construct
  misc_feature 1..25: note = Oligonucleotide
  source 1..25: mol_type = other DNA
gggcaaattgagataaggggcttgt

SEQ ID NO: 29041 - DNA, 25 bp, synthetic construct
  misc_feature 1..25: note = Oligonucleotide
  source 1..25: mol_type = other DNA
agagggcaaattgagataaggggct

SEQ ID NO: 29042 - DNA, 25 bp, synthetic construct
  misc_feature 1..25: note = Oligonucleotide
  source 1..25: mol_type = other DNA
ttgagagggcaaattgagataaggg

SEQ ID NO: 29043 - DNA, 25 bp, synthetic construct
  misc_feature 1..25: note = Oligonucleotide
  source 1..25: mol_type = other DNA
ttgttgagagggcaaattgagataa

SEQ ID NO: 29044 - DNA, 25 bp, synthetic construct
  misc_feature 1..25: note = Oligonucleotide
  source 1..25: mol_type = other DNA
gggttgttgagagggcaaattgaga

SEQ ID NO: 29045 - DNA, 25 bp, synthetic construct
  misc_feature 1..25: note = Oligonucleotide
  source 1..25: mol_type = other DNA
ggggggttgttgagagggcaaattg

SEQ ID NO: 29046 - DNA, 25 bp, synthetic construct
  misc_feature 1..25: note = Oligonucleotide
  source 1..25: mol_type = other DNA
cttggggggttgttgagagggcaaa

SEQ ID NO: 29047 - DNA, 25 bp, synthetic construct
  misc_feature 1..25: note = Oligonucleotide
  source 1..25: mol_type = other DNA
ctccttggggggttgttgagagggc

SEQ ID NO: 29048 - DNA, 25 bp, synthetic construct
  misc_feature 1..25: note = Oligonucleotide
  source 1..25: mol_type = other DNA
tcactccttggggggttgttgagag

SEQ ID NO: 29049 - DNA, 25 bp, synthetic construct
  misc_feature 1..25: note = Oligonucleotide
  source 1..25: mol_type = other DNA
taatcactccttggggggttgttga

SEQ ID NO: 29050 - DNA, 25 bp, synthetic construct
  misc_feature 1..25: note = Oligonucleotide
  source 1..25: mol_type = other DNA
gtctaatcactccttggggggttgt

SEQ ID NO: 29051 - DNA, 25 bp, synthetic construct
  misc_feature 1..25: note = Oligonucleotide
  source 1..25: mol_type = other DNA
acagtctaatcactccttggggggt

SEQ ID NO: 29052 - DNA, 25 bp, synthetic construct
  misc_feature 1..25: note = Oligonucleotide
  source 1..25: mol_type = other DNA
aaaacagtctaatcactccttgggg

SEQ ID NO: 29053 - DNA, 25 bp, synthetic construct
  misc_feature 1..25: note = Oligonucleotide
  source 1..25: mol_type = other DNA
cgtaaaacagtctaatcactccttg

SEQ ID NO: 29054 - DNA, 25 bp, synthetic construct
  misc_feature 1..25: note = Oligonucleotide
  source 1..25: mol_type = other DNA
ctccgtaaaacagtctaatcactcc

SEQ ID NO: 29055 - DNA, 25 bp, synthetic construct
  misc_feature 1..25: note = Oligonucleotide
  source 1..25: mol_type = other DNA
cttctccgtaaaacagtctaatcac

SEQ ID NO: 29056 - DNA, 25 bp, synthetic construct
  misc_feature 1..25: note = Oligonucleotide
  source 1..25: mol_type = other DNA
ttccttctccgtaaaacagtctaat

SEQ ID NO: 29057 - DNA, 25 bp, synthetic construct
  misc_feature 1..25: note = Oligonucleotide
  source 1..25: mol_type = other DNA
agtttccttctccgtaaaacagtct

SEQ ID NO: 29058 - DNA, 25 bp, synthetic construct
  misc_feature 1..25: note = Oligonucleotide
  source 1..25: mol_type = other DNA
ctcagtttccttctccgtaaaacag

SEQ ID NO: 29059 - DNA, 25 bp, synthetic construct
  misc_feature 1..25: note = Oligonucleotide
  source 1..25: mol_type = other DNA
tgcctcagtttccttctccgtaaaa

SEQ ID NO: 29060 - DNA, 25 bp, synthetic construct
  misc_feature 1..25: note = Oligonucleotide
  source 1..25: mol_type = other DNA
ctgtgcctcagtttccttctccgta

SEQ ID NO: 29061 - DNA, 25 bp, synthetic construct
  misc_feature 1..25: note = Oligonucleotide
  source 1..25: mol_type = other DNA
cctctgtgcctcagtttccttctcc

SEQ ID NO: 29062 - DNA, 25 bp, synthetic construct
  misc_feature 1..25: note = Oligonucleotide
  source 1..25: mol_type = other DNA
ccccctctgtgcctcagtttccttc

SEQ ID NO: 29063 - DNA, 25 bp, synthetic construct
  misc_feature 1..25: note = Oligonucleotide
  source 1..25: mol_type = other DNA
taaccccctctgtgcctcagtttcc

SEQ ID NO: 29064 - DNA, 25 bp, synthetic construct
  misc_feature 1..25: note = Oligonucleotide
  source 1..25: mol_type = other DNA
aattaaccccctctgtgcctcagtt

SEQ ID NO: 29065 - DNA, 25 bp, synthetic construct
  misc_feature 1..25: note = Oligonucleotide
  source 1..25: mol_type = other DNA
ctgaattaaccccctctgtgcctca

SEQ ID NO: 29066 - DNA, 25 bp, synthetic construct
  misc_feature 1..25: note = Oligonucleotide
  source 1..25: mol_type = other DNA
ggtctgaattaaccccctctgtgcc

SEQ ID NO: 29067 - DNA, 25 bp, synthetic construct
  misc_feature 1..25: note = Oligonucleotide
  source 1..25: mol_type = other DNA
tcaggtctgaattaaccccctctgt

SEQ ID NO: 29068 - DNA, 25 bp, synthetic construct
  misc_feature 1..25: note = Oligonucleotide
  source 1..25: mol_type = other DNA
caatcaggtctgaattaaccccctc

SEQ ID NO: 29069 - DNA, 25 bp, synthetic construct
  misc_feature 1..25: note = Oligonucleotide
  source 1..25: mol_type = other DNA
aatcaatcaggtctgaattaacccc

SEQ ID NO: 29070 - DNA, 25 bp, synthetic construct
  misc_feature 1..25: note = Oligonucleotide
  source 1..25: mol_type = other DNA
ctgaatcaatcaggtctgaattaac

SEQ ID NO: 29071 - DNA, 25 bp, synthetic construct
  misc_feature 1..25: note = Oligonucleotide
  source 1..25: mol_type = other DNA
accctgaatcaatcaggtctgaatt

SEQ ID NO: 29072 - DNA, 25 bp, synthetic construct
  misc_feature 1..25: note = Oligonucleotide
  source 1..25: mol_type = other DNA
cagaccctgaatcaatcaggtctga

SEQ ID NO: 29073 - DNA, 25 bp, synthetic construct
  misc_feature 1..25: note = Oligonucleotide
  source 1..25: mol_type = other DNA
aggcagaccctgaatcaatcaggtc

SEQ ID NO: 29074 - DNA, 25 bp, synthetic construct
  misc_feature 1..25: note = Oligonucleotide
  source 1..25: mol_type = other DNA
caaaggcagaccctgaatcaatcag

SEQ ID NO: 29075 - DNA, 25 bp, synthetic construct
  misc_feature 1..25: note = Oligonucleotide
  source 1..25: mol_type = other DNA
tgacaaaggcagaccctgaatcaat

SEQ ID NO: 29076 - DNA, 25 bp, synthetic construct
  misc_feature 1..25: note = Oligonucleotide
  source 1..25: mol_type = other DNA
gagtgacaaaggcagaccctgaatc

SEQ ID NO: 29077 - DNA, 25 bp, synthetic construct
  misc_feature 1..25: note = Oligonucleotide
  source 1..25: mol_type = other DNA
tgggagtgacaaaggcagaccctga

SEQ ID NO: 29078 - DNA, 25 bp, synthetic construct
  misc_feature 1..25: note = Oligonucleotide
  source 1..25: mol_type = other DNA
gcatgggagtgacaaaggcagaccc

SEQ ID NO: 29079 - DNA, 25 bp, synthetic construct
  misc_feature 1..25: note = Oligonucleotide
  source 1..25: mol_type = other DNA
agggcatgggagtgacaaaggcaga

SEQ ID NO: 29080 - DNA, 25 bp, synthetic construct
  misc_feature 1..25: note = Oligonucleotide
  source 1..25: mol_type = other DNA
cggagggcatgggagtgacaaaggc

SEQ ID NO: 29081 - DNA, 25 bp, synthetic construct
  misc_feature 1..25: note = Oligonucleotide
  source 1..25: mol_type = other DNA
gtacggagggcatgggagtgacaaa

SEQ ID NO: 29082 - DNA, 25 bp, synthetic construct
  misc_feature 1..25: note = Oligonucleotide
  source 1..25: mol_type = other DNA
tgtgtacggagggcatgggagtgac

SEQ ID NO: 29083 - DNA, 25 bp, synthetic construct
  misc_feature 1..25: note = Oligonucleotide
  source 1..25: mol_type = other DNA
aaatgtgtacggagggcatgggagt

SEQ ID NO: 29084 - DNA, 25 bp, synthetic construct
  misc_feature 1..25: note = Oligonucleotide
  source 1..25: mol_type = other DNA
agcaaatgtgtacggagggcatggg

SEQ ID NO: 29085 - DNA, 25 bp, synthetic construct
  misc_feature 1..25: note = Oligonucleotide
  source 1..25: mol_type = other DNA
tggagcaaatgtgtacggagggcat

SEQ ID NO: 29086 - DNA, 25 bp, synthetic construct
  misc_feature 1..25: note = Oligonucleotide
  source 1..25: mol_type = other DNA
ccttggagcaaatgtgtacggaggg

SEQ ID NO: 29087 - DNA, 25 bp, synthetic construct
  misc_feature 1..25: note = Oligonucleotide
  source 1..25: mol_type = other DNA
tgtccttggagcaaatgtgtacgga

SEQ ID NO: 29088 - DNA, 25 bp, synthetic construct
  misc_feature 1..25: note = Oligonucleotide
  source 1..25: mol_type = other DNA
tcctgtccttggagcaaatgtgtac

SEQ ID NO: 29089 - DNA, 25 bp, synthetic construct
  misc_feature 1..25: note = Oligonucleotide
  source 1..25: mol_type = other DNA
ctgtcctgtccttggagcaaatgtg

SEQ ID NO: 29090 - DNA, 25 bp, synthetic construct
  misc_feature 1..25: note = Oligonucleotide
  source 1..25: mol_type = other DNA
tgactgtcctgtccttggagcaaat

SEQ ID NO: 29091 - DNA, 25 bp, synthetic construct
  misc_feature 1..25: note = Oligonucleotide
  source 1..25: mol_type = other DNA
tcatgactgtcctgtccttggagca

SEQ ID NO: 29092 - DNA, 25 bp, synthetic construct
  misc_feature 1..25: note = Oligonucleotide
  source 1..25: mol_type = other DNA
aagtcatgactgtcctgtccttgga

SEQ ID NO: 29093 - DNA, 25 bp, synthetic construct
  misc_feature 1..25: note = Oligonucleotide
  source 1..25: mol_type = other DNA
agcaagtcatgactgtcctgtcctt

SEQ ID NO: 29094 - DNA, 25 bp, synthetic construct
  misc_feature 1..25: note = Oligonucleotide
  source 1..25: mol_type = other DNA
tgtagcaagtcatgactgtcctgtc

SEQ ID NO: 29095 - DNA, 25 bp, synthetic construct
  misc_feature 1..25: note = Oligonucleotide
  source 1..25: mol_type = other DNA
ggatgtagcaagtcatgactgtcct

SEQ ID NO: 29096 - DNA, 25 bp, synthetic construct
  misc_feature 1..25: note = Oligonucleotide
  source 1..25: mol_type = other DNA
ataggatgtagcaagtcatgactgt

SEQ ID NO: 29097 - DNA, 25 bp, synthetic construct
  misc_feature 1..25: note = Oligonucleotide
  source 1..25: mol_type = other DNA
ggcataggatgtagcaagtcatgac

SEQ ID NO: 29098 - DNA, 25 bp, synthetic construct
  misc_feature 1..25: note = Oligonucleotide
  source 1..25: mol_type = other DNA
gtgggcataggatgtagcaagtcat

SEQ ID NO: 29099 - DNA, 25 bp, synthetic construct
  misc_feature 1..25: note = Oligonucleotide
  source 1..25: mol_type = other DNA
ccagtgggcataggatgtagcaagt

SEQ ID NO: 29100 - DNA, 25 bp, synthetic construct
  misc_feature 1..25: note = Oligonucleotide
  source 1..25: mol_type = other DNA
accccagtgggcataggatgtagca

SEQ ID NO: 29101 - DNA, 25 bp, synthetic construct
  misc_feature 1..25: note = Oligonucleotide
  source 1..25: mol_type = other DNA
gggaccccagtgggcataggatgta

SEQ ID NO: 29102 - DNA, 25 bp, synthetic construct
  misc_feature 1..25: note = Oligonucleotide
  source 1..25: mol_type = other DNA
tctgggaccccagtgggcataggat

SEQ ID NO: 29103 - DNA, 25 bp, synthetic construct
  misc_feature 1..25: note = Oligonucleotide
  source 1..25: mol_type = other DNA
cactctgggaccccagtgggcatag

SEQ ID NO: 29104 - DNA, 25 bp, synthetic construct
  misc_feature 1..25: note = Oligonucleotide
  source 1..25: mol_type = other DNA
ccccactctgggaccccagtgggca

SEQ ID NO: 29105 - DNA, 25 bp, synthetic construct
  misc_feature 1..25: note = Oligonucleotide
  source 1..25: mol_type = other DNA
aggccccactctgggaccccagtgg

SEQ ID NO: 29106 - DNA, 25 bp, synthetic construct
  misc_feature 1..25: note = Oligonucleotide
  source 1..25: mol_type = other DNA
tacaggccccactctgggaccccag

SEQ ID NO: 29107 - DNA, 25 bp, synthetic construct
  misc_feature 1..25: note = Oligonucleotide
  source 1..25: mol_type = other DNA
gtgtacaggccccactctgggaccc

SEQ ID NO: 29108 - DNA, 25 bp, synthetic construct
  misc_feature 1..25: note = Oligonucleotide
  source 1..25: mol_type = other DNA
tctgtgtacaggccccactctggga

SEQ ID NO: 29109 - DNA, 25 bp, synthetic construct
  misc_feature 1..25: note = Oligonucleotide
  source 1..25: mol_type = other DNA
tcttctgtgtacaggccccactctg

SEQ ID NO: 29110 - DNA, 25 bp, synthetic construct
  misc_feature 1..25: note = Oligonucleotide
  source 1..25: mol_type = other DNA
tcctcttctgtgtacaggccccact

SEQ ID NO: 29111 - DNA, 25 bp, synthetic construct
  misc_feature 1..25: note = Oligonucleotide
  source 1..25: mol_type = other DNA
agttcctcttctgtgtacaggcccc

SEQ ID NO: 29112 - DNA, 25 bp, synthetic construct
  misc_feature 1..25: note = Oligonucleotide
  source 1..25: mol_type = other DNA
tccagttcctcttctgtgtacaggc

SEQ ID NO: 29113 - DNA, 25 bp, synthetic construct
  misc_feature 1..25: note = Oligonucleotide
  source 1..25: mol_type = other DNA
ccttccagttcctcttctgtgtaca

SEQ ID NO: 29114 - DNA, 25 bp, synthetic construct
  misc_feature 1..25: note = Oligonucleotide
  source 1..25: mol_type = other DNA
cctccttccagttcctcttctgtgt

SEQ ID NO: 29115 - DNA, 25 bp, synthetic construct
  misc_feature 1..25: note = Oligonucleotide
  source 1..25: mol_type = other DNA
gcacctccttccagttcctcttctg

SEQ ID NO: 29116 - DNA, 25 bp, synthetic construct
  misc_feature 1..25: note = Oligonucleotide
  source 1..25: mol_type = other DNA
gcggcacctccttccagttcctctt

SEQ ID NO: 29117 - DNA, 25 bp, synthetic construct
  misc_feature 1..25: note = Oligonucleotide
  source 1..25: mol_type = other DNA
aaggcggcacctccttccagttcct

SEQ ID NO: 29118 - DNA, 25 bp, synthetic construct
  misc_feature 1..25: note = Oligonucleotide
  source 1..25: mol_type = other DNA
gagaaggcggcacctccttccagtt

SEQ ID NO: 29119 - DNA, 25 bp, synthetic construct
  misc_feature 1..25: note = Oligonucleotide
  source 1..25: mol_type = other DNA
ccagagaaggcggcacctccttcca

SEQ ID NO: 29120 - DNA, 25 bp, synthetic construct
  misc_feature 1..25: note = Oligonucleotide
  source 1..25: mol_type = other DNA
ccaccagagaaggcggcacctcctt

SEQ ID NO: 29121 - DNA, 25 bp, synthetic construct
  misc_feature 1..25: note = Oligonucleotide
  source 1..25: mol_type = other DNA
tgcccaccagagaaggcggcacctc

SEQ ID NO: 29122 - DNA, 25 bp, synthetic construct
  misc_feature 1..25: note = Oligonucleotide
  source 1..25: mol_type = other DNA
acctgcccaccagagaaggcggcac

SEQ ID NO: 29123 - DNA, 25 bp, synthetic construct
  misc_feature 1..25: note = Oligonucleotide
  source 1..25: mol_type = other DNA
ggcacctgcccaccagagaaggcgg

SEQ ID NO: 29124 - DNA, 25 bp, synthetic construct
  misc_feature 1..25: note = Oligonucleotide
  source 1..25: mol_type = other DNA
ggtggcacctgcccaccagagaagg

SEQ ID NO: 29125 - DNA, 25 bp, synthetic construct
  misc_feature 1..25: note = Oligonucleotide
  source 1..25: mol_type = other DNA
ccgggtggcacctgcccaccagaga

SEQ ID NO: 29126 - DNA, 25 bp, synthetic construct
  misc_feature 1..25: note = Oligonucleotide
  source 1..25: mol_type = other DNA
ccaccgggtggcacctgcccaccag

SEQ ID NO: 29127 - DNA, 25 bp, synthetic construct
  misc_feature 1..25: note = Oligonucleotide
  source 1..25: mol_type = other DNA
atcccaccgggtggcacctgcccac

SEQ ID NO: 29128 - DNA, 25 bp, synthetic construct
  misc_feature 1..25: note = Oligonucleotide
  source 1..25: mol_type = other DNA
cagatcccaccgggtggcacctgcc

SEQ ID NO: 29129 - DNA, 25 bp, synthetic construct
  misc_feature 1..25: note = Oligonucleotide
  source 1..25: mol_type = other DNA
taccagatcccaccgggtggcacct

SEQ ID NO: 29130 - DNA, 25 bp, synthetic construct
  misc_feature 1..25: note = Oligonucleotide
  source 1..25: mol_type = other DNA
gtctaccagatcccaccgggtggca

SEQ ID NO: 29131 - DNA, 25 bp, synthetic construct
  misc_feature 1..25: note = Oligonucleotide
  source 1..25: mol_type = other DNA
ccagtctaccagatcccaccgggtg

SEQ ID NO: 29132 - DNA, 25 bp, synthetic construct
  misc_feature 1..25: note = Oligonucleotide
  source 1..25: mol_type = other DNA
gtcccagtctaccagatcccaccgg

SEQ ID NO: 29133 - DNA, 25 bp, synthetic construct
  misc_feature 1..25: note = Oligonucleotide
  source 1..25: mol_type = other DNA
caggtcccagtctaccagatcccac

SEQ ID NO: 29134 - DNA, 25 bp, synthetic construct
  misc_feature 1..25: note = Oligonucleotide
  source 1..25: mol_type = other DNA
acacaggtcccagtctaccagatcc

SEQ ID NO: 29135 - DNA, 25 bp, synthetic construct
  misc_feature 1..25: note = Oligonucleotide
  source 1..25: mol_type = other DNA
gttacacaggtcccagtctaccaga

SEQ ID NO: 29136 - DNA, 25 bp, synthetic construct
  misc_feature 1..25: note = Oligonucleotide
  source 1..25: mol_type = other DNA
agggttacacaggtcccagtctacc

SEQ ID NO: 29137 - DNA, 25 bp, synthetic construct
  misc_feature 1..25: note = Oligonucleotide
  source 1..25: mol_type = other DNA
tgaagggttacacaggtcccagtct

SEQ ID NO: 29138 - DNA, 25 bp, synthetic construct
  misc_feature 1..25: note = Oligonucleotide
  source 1..25: mol_type = other DNA
gcctgaagggttacacaggtcccag

SEQ ID NO: 29139 - DNA, 25 bp, synthetic construct
  misc_feature 1..25: note = Oligonucleotide
  source 1..25: mol_type = other DNA
gttgcctgaagggttacacaggtcc

SEQ ID NO: 29140 - DNA, 25 bp, synthetic construct
  misc_feature 1..25: note = Oligonucleotide
  source 1..25: mol_type = other DNA
cctgttgcctgaagggttacacagg

SEQ ID NO: 29141 - DNA, 25 bp, synthetic construct
  misc_feature 1..25: note = Oligonucleotide
  source 1..25: mol_type = other DNA
tatcctgttgcctgaagggttacac

SEQ ID NO: 29142 - DNA, 25 bp, synthetic construct
  misc_feature 1..25: note = Oligonucleotide
  source 1..25: mol_type = other DNA
agctatcctgttgcctgaagggtta

SEQ ID NO: 29143 - DNA, 25 bp, synthetic construct
  misc_feature 1..25: note = Oligonucleotide
  source 1..25: mol_type = other DNA
gcaagctatcctgttgcctgaaggg

SEQ ID NO: 29144 - DNA, 25 bp, synthetic construct
  misc_feature 1..25: note = Oligonucleotide
  source 1..25: mol_type = other DNA
gcagcaagctatcctgttgcctgaa

SEQ ID NO: 29145 - DNA, 25 bp, synthetic construct
  misc_feature 1..25: note = Oligonucleotide
  source 1..25: mol_type = other DNA
gaggcagcaagctatcctgttgcct

SEQ ID NO: 29146 - DNA, 25 bp, synthetic construct
  misc_feature 1..25: note = Oligonucleotide
  source 1..25: mol_type = other DNA
cgagaggcagcaagctatcctgttg

SEQ ID NO: 29147 - DNA, 25 bp, synthetic construct
  misc_feature 1..25: note = Oligonucleotide
  source 1..25: mol_type = other DNA
tgtcgagaggcagcaagctatcctg

SEQ ID NO: 29148 - DNA, 25 bp, synthetic construct
  misc_feature 1..25: note = Oligonucleotide
  source 1..25: mol_type = other DNA
ggctgtcgagaggcagcaagctatc

SEQ ID NO: 29149 - DNA, 25 bp, synthetic construct
  misc_feature 1..25: note = Oligonucleotide
  source 1..25: mol_type = other DNA
caaggctgtcgagaggcagcaagct

SEQ ID NO: 29150 - DNA, 25 bp, synthetic construct
  misc_feature 1..25: note = Oligonucleotide
  source 1..25: mol_type = other DNA
aagcaaggctgtcgagaggcagcaa

SEQ ID NO: 29151 - DNA, 25 bp, synthetic construct
  misc_feature 1..25: note = Oligonucleotide
  source 1..25: mol_type = other DNA
ggcaagcaaggctgtcgagaggcag

SEQ ID NO: 29152 - DNA, 25 bp, synthetic construct
  misc_feature 1..25: note = Oligonucleotide
  source 1..25: mol_type = other DNA
gggggcaagcaaggctgtcgagagg

SEQ ID NO: 29153 - DNA, 25 bp, synthetic construct
  misc_feature 1..25: note = Oligonucleotide
  source 1..25: mol_type = other DNA
agagggggcaagcaaggctgtcgag

SEQ ID NO: 29154 - DNA, 25 bp, synthetic construct
  misc_feature 1..25: note = Oligonucleotide
  source 1..25: mol_type = other DNA
tctagagggggcaagcaaggctgtc

SEQ ID NO: 29155 - DNA, 25 bp, synthetic construct
  misc_feature 1..25: note = Oligonucleotide
  source 1..25: mol_type = other DNA
cagtctagagggggcaagcaaggct

SEQ ID NO: 29156 - DNA, 25 bp, synthetic construct
  misc_feature 1..25: note = Oligonucleotide
  source 1..25: mol_type = other DNA
tgtcagtctagagggggcaagcaag

SEQ ID NO: 29157 - DNA, 25 bp, synthetic construct
  misc_feature 1..25: note = Oligonucleotide
  source 1..25: mol_type = other DNA
gcctgtcagtctagagggggcaagc

SEQ ID NO: 29158 - DNA, 25 bp, synthetic construct
  misc_feature 1..25: note = Oligonucleotide
  source 1..25: mol_type = other DNA
aaggcctgtcagtctagagggggca

SEQ ID NO: 29159 - DNA, 25 bp, synthetic construct
  misc_feature 1..25: note = Oligonucleotide
  source 1..25: mol_type = other DNA
cccaaggcctgtcagtctagagggg

SEQ ID NO: 29160 - DNA, 25 bp, synthetic construct
  misc_feature 1..25: note = Oligonucleotide
  source 1..25: mol_type = other DNA
ccacccaaggcctgtcagtctagag

SEQ ID NO: 29161 - DNA, 25 bp, synthetic construct
  misc_feature 1..25: note = Oligonucleotide
  source 1..25: mol_type = other DNA
accccacccaaggcctgtcagtcta

SEQ ID NO: 29162 - DNA, 25 bp, synthetic construct
  misc_feature 1..25: note = Oligonucleotide
  source 1..25: mol_type = other DNA
gggaccccacccaaggcctgtcagt

SEQ ID NO: 29163 - DNA, 25 bp, synthetic construct
  misc_feature 1..25: note = Oligonucleotide
  source 1..25: mol_type = other DNA
ccagggaccccacccaaggcctgtc

SEQ ID NO: 29164 - DNA, 25 bp, synthetic construct
  misc_feature 1..25: note = Oligonucleotide
  source 1..25: mol_type = other DNA
aggccagggaccccacccaaggcct

SEQ ID NO: 29165 - DNA, 25 bp, synthetic construct
  misc_feature 1..25: note = Oligonucleotide
  source 1..25: mol_type = other DNA
cccaggccagggaccccacccaagg

SEQ ID NO: 29166 - DNA, 25 bp, synthetic construct
  misc_feature 1..25: note = Oligonucleotide
  source 1..25: mol_type = other DNA
acgcccaggccagggaccccaccca

SEQ ID NO: 29167 - DNA, 25 bp, synthetic construct
  misc_feature 1..25: note = Oligonucleotide
  source 1..25: mol_type = other DNA
tccacgcccaggccagggaccccac

SEQ ID NO: 29168 - DNA, 25 bp, synthetic construct
  misc_feature 1..25: note = Oligonucleotide
  source 1..25: mol_type = other DNA
cattccacgcccaggccagggaccc

SEQ ID NO: 29169 - DNA, 25 bp, synthetic construct
  misc_feature 1..25: note = Oligonucleotide
  source 1..25: mol_type = other DNA
gcccattccacgcccaggccaggga

SEQ ID NO: 29170 - DNA, 25 bp, synthetic construct
  misc_feature 1..25: note = Oligonucleotide
  source 1..25: mol_type = other DNA
gatgcccattccacgcccaggccag

SEQ ID NO: 29171 - DNA, 25 bp, synthetic construct
  misc_feature 1..25: note = Oligonucleotide
  source 1..25: mol_type = other DNA
tgggatgcccattccacgcccaggc

SEQ ID NO: 29172 - DNA, 25 bp, synthetic construct
  misc_feature 1..25: note = Oligonucleotide
  source 1..25: mol_type = other DNA
ctgtgggatgcccattccacgccca

SEQ ID NO: 29173 - DNA, 25 bp, synthetic construct
  misc_feature 1..25: note = Oligonucleotide
  source 1..25: mol_type = other DNA
gcactgtgggatgcccattccacgc

SEQ ID NO: 29174 - DNA, 25 bp, synthetic construct
  misc_feature 1..25: note = Oligonucleotide
  source 1..25: mol_type = other DNA
aaagcactgtgggatgcccattcca

SEQ ID NO: 29175 - DNA, 25 bp, synthetic construct
  misc_feature 1..25: note = Oligonucleotide
  source 1..25: mol_type = other DNA
tcaaaagcactgtgggatgcccatt

SEQ ID NO: 29176 - DNA, 25 bp, synthetic construct
  misc_feature 1..25: note = Oligonucleotide
  source 1..25: mol_type = other DNA
tcatcaaaagcactgtgggatgccc

SEQ ID NO: 29177 - DNA, 25 bp, synthetic construct
  misc_feature 1..25: note = Oligonucleotide
  source 1..25: mol_type = other DNA
tactcatcaaaagcactgtgggatg

SEQ ID NO: 29178 - DNA, 25 bp, synthetic construct
  misc_feature 1..25: note = Oligonucleotide
  source 1..25: mol_type = other DNA
aggtactcatcaaaagcactgtggg

SEQ ID NO: 29179 - DNA, 25 bp, synthetic construct
  misc_feature 1..25: note = Oligonucleotide
  source 1..25: mol_type = other DNA
ccaaggtactcatcaaaagcactgt

SEQ ID NO: 29180 - DNA, 25 bp, synthetic construct
  misc_feature 1..25: note = Oligonucleotide
  source 1..25: mol_type = other DNA
tccccaaggtactcatcaaaagcac

SEQ ID NO: 29181 - DNA, 25 bp, synthetic construct
  misc_feature 1..25: note = Oligonucleotide
  source 1..25: mol_type = other DNA
atttccccaaggtactcatcaaaag

SEQ ID NO: 29182 - DNA, 25 bp, synthetic construct
  misc_feature 1..25: note = Oligonucleotide
  source 1..25: mol_type = other DNA
agcatttccccaaggtactcatcaa

SEQ ID NO: 29183 - DNA, 25 bp, synthetic construct
  misc_feature 1..25: note = Oligonucleotide
  source 1..25: mol_type = other DNA
agaagcatttccccaaggtactcat

SEQ ID NO: 29184 - DNA, 25 bp, synthetic construct
  misc_feature 1..25: note = Oligonucleotide
  source 1..25: mol_type = other DNA
tggagaagcatttccccaaggtact

SEQ ID NO: 29185 - DNA, 25 bp, synthetic construct
  misc_feature 1..25: note = Oligonucleotide
  source 1..25: mol_type = other DNA
ccctggagaagcatttccccaaggt

SEQ ID NO: 29186 - DNA, 25 bp, synthetic construct
  misc_feature 1..25: note = Oligonucleotide
  source 1..25: mol_type = other DNA
gcaccctggagaagcatttccccaa

SEQ ID NO: 29187 - DNA, 25 bp, synthetic construct
  misc_feature 1..25: note = Oligonucleotide
  source 1..25: mol_type = other DNA
acagcaccctggagaagcatttccc

SEQ ID NO: 29188 - DNA, 25 bp, synthetic construct
  misc_feature 1..25: note = Oligonucleotide
  source 1..25: mol_type = other DNA
atgacagcaccctggagaagcattt

SEQ ID NO: 29189 - DNA, 25 bp, synthetic construct
  misc_feature 1..25: note = Oligonucleotide
  source 1..25: mol_type = other DNA
ggcatgacagcaccctggagaagca

SEQ ID NO: 29190 - DNA, 25 bp, synthetic construct
  misc_feature 1..25: note = Oligonucleotide
  source 1..25: mol_type = other DNA
atgggcatgacagcaccctggagaa

SEQ ID NO: 29191 - DNA, 25 bp, synthetic construct
  misc_feature 1..25: note = Oligonucleotide
  source 1..25: mol_type = other DNA
ctcatgggcatgacagcaccctgga

SEQ ID NO: 29192 - DNA, 25 bp, synthetic construct
  misc_feature 1..25: note = Oligonucleotide
  source 1..25: mol_type = other DNA
gttctcatgggcatgacagcaccct

SEQ ID NO: 29193 - DNA, 25 bp, synthetic construct
  misc_feature 1..25: note = Oligonucleotide
  source 1..25: mol_type = other DNA
tgtgttctcatgggcatgacagcac

SEQ ID NO: 29194 - DNA, 25 bp, synthetic construct
  misc_feature 1..25: note = Oligonucleotide
  source 1..25: mol_type = other DNA
aggtgtgttctcatgggcatgacag

SEQ ID NO: 29195 - DNA, 25 bp, synthetic construct
  misc_feature 1..25: note = Oligonucleotide
  source 1..25: mol_type = other DNA
cacaggtgtgttctcatgggcatga

SEQ ID NO: 29196 - DNA, 25 bp, synthetic construct
  misc_feature 1..25: note = Oligonucleotide
  source 1..25: mol_type = other DNA
aggcacaggtgtgttctcatgggca

SEQ ID NO: 29197 - DNA, 25 bp, synthetic construct
  misc_feature 1..25: note = Oligonucleotide
  source 1..25: mol_type = other DNA
cccaggcacaggtgtgttctcatgg

SEQ ID NO: 29198 - DNA, 25 bp, synthetic construct
  misc_feature 1..25: note = Oligonucleotide
  source 1..25: mol_type = other DNA
actcccaggcacaggtgtgttctca

SEQ ID NO: 29199 - DNA, 25 bp, synthetic construct
  misc_feature 1..25: note = Oligonucleotide
  source 1..25: mol_type = other DNA
cacactcccaggcacaggtgtgttc

SEQ ID NO: 29200 - DNA, 25 bp, synthetic construct
  misc_feature 1..25: note = Oligonucleotide
  source 1..25: mol_type = other DNA
gcacacactcccaggcacaggtgtg

SEQ ID NO: 29201 - DNA, 25 bp, synthetic construct
  misc_feature 1..25: note = Oligonucleotide
  source 1..25: mol_type = other DNA
caggcacacactcccaggcacaggt

SEQ ID NO: 29202 - DNA, 25 bp, synthetic construct
  misc_feature 1..25: note = Oligonucleotide
  source 1..25: mol_type = other DNA
tctcaggcacacactcccaggcaca

SEQ ID NO: 29203 - DNA, 25 bp, synthetic construct
  misc_feature 1..25: note = Oligonucleotide
  source 1..25: mol_type = other DNA
ctctctcaggcacacactcccaggc

SEQ ID NO: 29204 - DNA, 25 bp, synthetic construct
  misc_feature 1..25: note = Oligonucleotide
  source 1..25: mol_type = other DNA
accctctctcaggcacacactccca

SEQ ID NO: 29205 - DNA, 25 bp, synthetic construct
  misc_feature 1..25: note = Oligonucleotide
  source 1..25: mol_type = other DNA
cttaccctctctcaggcacacactc

SEQ ID NO: 29206 - DNA, 25 bp, synthetic construct
  misc_feature 1..25: note = Oligonucleotide
  source 1..25: mol_type = other DNA
tctcttaccctctctcaggcacaca

SEQ ID NO: 29207 - DNA, 25 bp, synthetic construct
  misc_feature 1..25: note = Oligonucleotide
  source 1..25: mol_type = other DNA
ttgtctcttaccctctctcaggcac

SEQ ID NO: 29208 - DNA, 25 bp, synthetic construct
  misc_feature 1..25: note = Oligonucleotide
  source 1..25: mol_type = other DNA
acattgtctcttaccctctctcagg

SEQ ID NO: 29209 - DNA, 25 bp, synthetic construct
  misc_feature 1..25: note = Oligonucleotide
  source 1..25: mol_type = other DNA
tccacattgtctcttaccctctctc

SEQ ID NO: 29210 - DNA, 25 bp, synthetic construct
  misc_feature 1..25: note = Oligonucleotide
  source 1..25: mol_type = other DNA
gggtccacattgtctcttaccctct

SEQ ID NO: 29211 - DNA, 25 bp, synthetic construct
  misc_feature 1..25: note = Oligonucleotide
  source 1..25: mol_type = other DNA
tttgggtccacattgtctcttaccc

SEQ ID NO: 29212 - DNA, 25 bp, synthetic construct
  misc_feature 1..25: note = Oligonucleotide
  source 1..25: mol_type = other DNA
ctctttgggtccacattgtctctta

SEQ ID NO: 29213 - DNA, 25 bp, synthetic construct
  misc_feature 1..25: note = Oligonucleotide
  source 1..25: mol_type = other DNA
tcactctttgggtccacattgtctc

SEQ ID NO: 29214 - DNA, 25 bp, synthetic construct
  misc_feature 1..25: note = Oligonucleotide
  source 1..25: mol_type = other DNA
gggtcactctttgggtccacattgt

SEQ ID NO: 29215 - DNA, 25 bp, synthetic construct
  misc_feature 1..25: note = Oligonucleotide
  source 1..25: mol_type = other DNA
gtcgggtcactctttgggtccacat

SEQ ID NO: 29216 - DNA, 25 bp, synthetic construct
  misc_feature 1..25: note = Oligonucleotide
  source 1..25: mol_type = other DNA
cacgtcgggtcactctttgggtcca

SEQ ID NO: 29217 - DNA, 25 bp, synthetic construct
  misc_feature 1..25: note = Oligonucleotide
  source 1..25: mol_type = other DNA
tgtcacgtcgggtcactctttgggt

SEQ ID NO: 29218 - DNA, 25 bp, synthetic construct
  misc_feature 1..25: note = Oligonucleotide
  source 1..25: mol_type = other DNA
ctctgtcacgtcgggtcactctttg

SEQ ID NO: 29219 - DNA, 25 bp, synthetic construct
  misc_feature 1..25: note = Oligonucleotide
  source 1..25: mol_type = other DNA
tgcctctgtcacgtcgggtcactct

SEQ ID NO: 29220 - DNA, 25 bp, synthetic construct
  misc_feature 1..25: note = Oligonucleotide
  source 1..25: mol_type = other DNA
ccttgcctctgtcacgtcgggtcac

SEQ ID NO: 29221 - DNA, 25 bp, synthetic construct
  misc_feature 1..25: note = Oligonucleotide
  source 1..25: mol_type = other DNA
cttccttgcctctgtcacgtcgggt

SEQ ID NO: 29222 - DNA, 25 bp, synthetic construct
  misc_feature 1..25: note = Oligonucleotide
  source 1..25: mol_type = other DNA
ctgcttccttgcctctgtcacgtcg

SEQ ID NO: 29223 - DNA, 25 bp, synthetic construct
  misc_feature 1..25: note = Oligonucleotide
  source 1..25: mol_type = other DNA
cctctgcttccttgcctctgtcacg

SEQ ID NO: 29224 - DNA, 25 bp, synthetic construct
  misc_feature 1..25: note = Oligonucleotide
  source 1..25: mol_type = other DNA
tcacctctgcttccttgcctctgtc

SEQ ID NO: 29225 - DNA, 25 bp, synthetic construct
  misc_feature 1..25: note = Oligonucleotide
  source 1..25: mol_type = other DNA
tggtcacctctgcttccttgcctct

SEQ ID NO: 29226 - DNA, 25 bp, synthetic construct
  misc_feature 1..25: note = Oligonucleotide
  source 1..25: mol_type = other DNA
aagtggtcacctctgcttccttgcc

SEQ ID NO: 29227 - DNA, 25 bp, synthetic construct
  misc_feature 1..25: note = Oligonucleotide
  source 1..25: mol_type = other DNA
tagaagtggtcacctctgcttcctt

SEQ ID NO: 29228 - DNA, 25 bp, synthetic construct
  misc_feature 1..25: note = Oligonucleotide
  source 1..25: mol_type = other DNA
gcctagaagtggtcacctctgcttc

SEQ ID NO: 29229 - DNA, 25 bp, synthetic construct
  misc_feature 1..25: note = Oligonucleotide
  source 1..25: mol_type = other DNA
ctggcctagaagtggtcacctctgc

SEQ ID NO: 29230 - DNA, 25 bp, synthetic construct
  misc_feature 1..25: note = Oligonucleotide
  source 1..25: mol_type = other DNA
attctggcctagaagtggtcacctc

SEQ ID NO: 29231 - DNA, 25 bp, synthetic construct
  misc_feature 1..25: note = Oligonucleotide
  source 1..25: mol_type = other DNA
atcattctggcctagaagtggtcac

SEQ ID NO: 29232 - DNA, 25 bp, synthetic construct
  misc_feature 1..25: note = Oligonucleotide
  source 1..25: mol_type = other DNA
tgaatcattctggcctagaagtggt

SEQ ID NO: 29233 - DNA, 25 bp, synthetic construct
  misc_feature 1..25: note = Oligonucleotide
  source 1..25: mol_type = other DNA
tactgaatcattctggcctagaagt

SEQ ID NO: 29234 - DNA, 25 bp, synthetic construct
  misc_feature 1..25: note = Oligonucleotide
  source 1..25: mol_type = other DNA
cgctactgaatcattctggcctaga

SEQ ID NO: 29235 - DNA, 25 bp, synthetic construct
  misc_feature 1..25: note = Oligonucleotide
  source 1..25: mol_type = other DNA
gaacgctactgaatcattctggcct

SEQ ID NO: 29236 - DNA, 25 bp, synthetic construct
  misc_feature 1..25: note = Oligonucleotide
  source 1..25: mol_type = other DNA
acagaacgctactgaatcattctgg

SEQ ID NO: 29237 - DNA, 25 bp, synthetic construct
  misc_feature 1..25: note = Oligonucleotide
  source 1..25: mol_type = other DNA
tatacagaacgctactgaatcattc

SEQ ID NO: 29238 - DNA, 25 bp, synthetic construct
  misc_feature 1..25: note = Oligonucleotide
  source 1..25: mol_type = other DNA
gaatatacagaacgctactgaatca

SEQ ID NO: 29239 - DNA, 25 bp, synthetic construct
  misc_feature 1..25: note = Oligonucleotide
  source 1..25: mol_type = other DNA
cgtgaatatacagaacgctactgaa

SEQ ID NO: 29240 - DNA, 25 bp, synthetic construct
  misc_feature 1..25: note = Oligonucleotide
  source 1..25: mol_type = other DNA
caccgtgaatatacagaacgctact

SEQ ID NO: 29241 - DNA, 25 bp, synthetic construct
  misc_feature 1..25: note = Oligonucleotide
  source 1..25: mol_type = other DNA
caacaccgtgaatatacagaacgct

SEQ ID NO: 29242 - DNA, 25 bp, synthetic construct
  misc_feature 1..25: note = Oligonucleotide
  source 1..25: mol_type = other DNA
gcacaacaccgtgaatatacagaac

SEQ ID NO: 29243 - DNA, 25 bp, synthetic construct
  misc_feature 1..25: note = Oligonucleotide
  source 1..25: mol_type = other DNA
gctgcacaacaccgtgaatatacag

SEQ ID NO: 29244 - DNA, 25 bp, synthetic construct
  misc_feature 1..25: note = Oligonucleotide
  source 1..25: mol_type = other DNA
tcggctgcacaacaccgtgaatata

SEQ ID NO: 29245 - DNA, 25 bp, synthetic construct
  misc_feature 1..25: note = Oligonucleotide
  source 1..25: mol_type = other DNA
gaatcggctgcacaacaccgtgaat

SEQ ID NO: 29246 - DNA, 25 bp, synthetic construct
  misc_feature 1..25: note = Oligonucleotide
  source 1..25: mol_type = other DNA
atagaatcggctgcacaacaccgtg

SEQ ID NO: 29247 - DNA, 25 bp, synthetic construct
  misc_feature 1..25: note = Oligonucleotide
  source 1..25: mol_type = other DNA
tcaatagaatcggctgcacaacacc

SEQ ID NO: 29248 - DNA, 25 bp, synthetic construct
  misc_feature 1..25: note = Oligonucleotide
  source 1..25: mol_type = other DNA
aattcaatagaatcggctgcacaac

SEQ ID NO: 29249 - DNA, 25 bp, synthetic construct
  misc_feature 1..25: note = Oligonucleotide
  source 1..25: mol_type = other DNA
ttgaattcaatagaatcggctgcac

SEQ ID NO: 29250 - DNA, 25 bp, synthetic construct
  misc_feature 1..25: note = Oligonucleotide
  source 1..25: mol_type = other DNA
gttttgaattcaatagaatcggctg

SEQ ID NO: 29251 - DNA, 25 bp, synthetic construct
  misc_feature 1..25: note = Oligonucleotide
  source 1..25: mol_type = other DNA
aatgttttgaattcaatagaatcgg

SEQ ID NO: 29252 - DNA, 25 bp, synthetic construct
  misc_feature 1..25: note = Oligonucleotide
  source 1..25: mol_type = other DNA
gaaaatgttttgaattcaatagaat

SEQ ID NO: 29253 - DNA, 25 bp, synthetic construct
  misc_feature 1..25: note = Oligonucleotide
  source 1..25: mol_type = other DNA
gatgaaaatgttttgaattcaatag

SEQ ID NO: 29254 - DNA, 25 bp, synthetic construct
  misc_feature 1..25: note = Oligonucleotide
  source 1..25: mol_type = other DNA
ggtgatgaaaatgttttgaattcaa

SEQ ID NO: 29255 - DNA, 25 bp, synthetic construct
  misc_feature 1..25: note = Oligonucleotide
  source 1..25: mol_type = other DNA
tgtggtgatgaaaatgttttgaatt

SEQ ID NO: 29256 - DNA, 25 bp, synthetic construct
  misc_feature 1..25: note = Oligonucleotide
  source 1..25: mol_type = other DNA
ttttgtggtgatgaaaatgttttga

SEQ ID NO: 29257 - DNA, 25 bp, synthetic construct
  misc_feature 1..25: note = Oligonucleotide
  source 1..25: mol_type = other DNA
ttcttttgtggtgatgaaaatgttt

SEQ ID NO: 29258 - DNA, 25 bp, synthetic construct
  misc_feature 1..25: note = Oligonucleotide
  source 1..25: mol_type = other DNA
gtcttcttttgtggtgatgaaaatg

SEQ ID NO: 29259 - DNA, 25 bp, synthetic construct
  misc_feature 1..25: note = Oligonucleotide
  source 1..25: mol_type = other DNA
agggtcttcttttgtggtgatgaaa

SEQ ID NO: 29260 - DNA, 25 bp, synthetic construct
  misc_feature 1..25: note = Oligonucleotide
  source 1..25: mol_type = other DNA
tccagggtcttcttttgtggtgatg

SEQ ID NO: 29261 - DNA, 25 bp, synthetic construct
  misc_feature 1..25: note = Oligonucleotide
  source 1..25: mol_type = other DNA
gtgtccagggtcttcttttgtggtg

SEQ ID NO: 29262 - DNA, 25 bp, synthetic construct
  misc_feature 1..25: note = Oligonucleotide
  source 1..25: mol_type = other DNA
aatgtgtccagggtcttcttttgtg

SEQ ID NO: 29263 - DNA, 25 bp, synthetic construct
  misc_feature 1..25: note = Oligonucleotide
  source 1..25: mol_type = other DNA
cttaatgtgtccagggtcttctttt

SEQ ID NO: 29264 - DNA, 25 bp, synthetic construct
  misc_feature 1..25: note = Oligonucleotide
  source 1..25: mol_type = other DNA
ttgcttaatgtgtccagggtcttct

SEQ ID NO: 29265 - DNA, 25 bp, synthetic construct
  misc_feature 1..25: note = Oligonucleotide
  source 1..25: mol_type = other DNA
ttattgcttaatgtgtccagggtct

SEQ ID NO: 29266 - DNA, 25 bp, synthetic construct
  misc_feature 1..25: note = Oligonucleotide
  source 1..25: mol_type = other DNA
gaattattgcttaatgtgtccaggg

SEQ ID NO: 29267 - DNA, 25 bp, synthetic construct
  misc_feature 1..25: note = Oligonucleotide
  source 1..25: mol_type = other DNA
gcagaattattgcttaatgtgtcca

SEQ ID NO: 29268 - DNA, 25 bp, synthetic construct
  misc_feature 1..25: note = Oligonucleotide
  source 1..25: mol_type = other DNA
gatgcagaattattgcttaatgtgt

SEQ ID NO: 29269 - DNA, 25 bp, synthetic construct
  misc_feature 1..25: note = Oligonucleotide
  source 1..25: mol_type = other DNA
attgatgcagaattattgcttaatg

SEQ ID NO: 29270 - DNA, 25 bp, synthetic construct
  misc_feature 1..25: note = Oligonucleotide
  source 1..25: mol_type = other DNA
gtaattgatgcagaattattgctta

SEQ ID NO: 29271 - DNA, 25 bp, synthetic construct
  misc_feature 1..25: note = Oligonucleotide
  source 1..25: mol_type = other DNA
agggtaattgatgcagaattattgc

SEQ ID NO: 29272 - DNA, 25 bp, synthetic construct
  misc_feature 1..25: note = Oligonucleotide
  source 1..25: mol_type = other DNA
gagagggtaattgatgcagaattat

SEQ ID NO: 29273 - DNA, 25 bp, synthetic construct
  misc_feature 1..25: note = Oligonucleotide
  source 1..25: mol_type = other DNA
agggagagggtaattgatgcagaat

SEQ ID NO: 29274 - DNA, 25 bp, synthetic construct
  misc_feature 1..25: note = Oligonucleotide
  source 1..25: mol_type = other DNA
tggagggagagggtaattgatgcag

SEQ ID NO: 29275 - DNA, 25 bp, synthetic construct
  misc_feature 1..25: note = Oligonucleotide
  source 1..25: mol_type = other DNA
agttggagggagagggtaattgatg

SEQ ID NO: 29276 - DNA, 25 bp, synthetic construct
  misc_feature 1..25: note = Oligonucleotide
  source 1..25: mol_type = other DNA
cagagttggagggagagggtaattg

SEQ ID NO: 29277 - DNA, 25 bp, synthetic construct
  misc_feature 1..25: note = Oligonucleotide
  source 1..25: mol_type = other DNA
tgacagagttggagggagagggtaa

SEQ ID NO: 29278 - DNA, 25 bp, synthetic construct
  misc_feature 1..25: note = Oligonucleotide
  source 1..25: mol_type = other DNA
ggctgacagagttggagggagaggg

SEQ ID NO: 29279 - DNA, 25 bp, synthetic construct
  misc_feature 1..25: note = Oligonucleotide
  source 1..25: mol_type = other DNA
aatggctgacagagttggagggaga

SEQ ID NO: 29280 - DNA, 25 bp, synthetic construct
  misc_feature 1..25: note = Oligonucleotide
  source 1..25: mol_type = other DNA
gttaatggctgacagagttggaggg

SEQ ID NO: 29281 - DNA, 25 bp, synthetic construct
  misc_feature 1..25: note = Oligonucleotide
  source 1..25: mol_type = other DNA
tgtgttaatggctgacagagttgga

SEQ ID NO: 29282 - DNA, 25 bp, synthetic construct
  misc_feature 1..25: note = Oligonucleotide
  source 1..25: mol_type = other DNA
aagtgtgttaatggctgacagagtt

SEQ ID NO: 29283 - DNA, 25 bp, synthetic construct
  misc_feature 1..25: note = Oligonucleotide
  source 1..25: mol_type = other DNA
cgaaagtgtgttaatggctgacaga

SEQ ID NO: 29284 - DNA, 25 bp, synthetic construct
  misc_feature 1..25: note = Oligonucleotide
  source 1..25: mol_type = other DNA
agacgaaagtgtgttaatggctgac

SEQ ID NO: 29285 - DNA, 25 bp, synthetic construct
  misc_feature 1..25: note = Oligonucleotide
  source 1..25: mol_type = other DNA
cagagacgaaagtgtgttaatggct

SEQ ID NO: 29286 - DNA, 25 bp, synthetic construct
  misc_feature 1..25: note = Oligonucleotide
  source 1..25: mol_type = other DNA
ccacagagacgaaagtgtgttaatg

SEQ ID NO: 29287 - DNA, 25 bp, synthetic construct
  misc_feature 1..25: note = Oligonucleotide
  source 1..25: mol_type = other DNA
agtccacagagacgaaagtgtgtta

SEQ ID NO: 29288 - DNA, 25 bp, synthetic construct
  misc_feature 1..25: note = Oligonucleotide
  source 1..25: mol_type = other DNA
tatagtccacagagacgaaagtgtg

SEQ ID NO: 29289 - DNA, 25 bp, synthetic construct
  misc_feature 1..25: note = Oligonucleotide
  source 1..25: mol_type = other DNA
atctatagtccacagagacgaaagt

SEQ ID NO: 29290 - DNA, 25 bp, synthetic construct
  misc_feature 1..25: note = Oligonucleotide
  source 1..25: mol_type = other DNA
taaatctatagtccacagagacgaa

SEQ ID NO: 29291 - DNA, 25 bp, synthetic construct
  misc_feature 1..25: note = Oligonucleotide
  source 1..25: mol_type = other DNA
aggtaaatctatagtccacagagac

SEQ ID NO: 29292 - DNA, 25 bp, synthetic construct
  misc_feature 1..25: note = Oligonucleotide
  source 1..25: mol_type = other DNA
aataggtaaatctatagtccacaga

SEQ ID NO: 29293 - DNA, 25 bp, synthetic construct
  misc_feature 1..25: note = Oligonucleotide
  source 1..25: mol_type = other DNA
aagaataggtaaatctatagtccac

SEQ ID NO: 29294 - DNA, 25 bp, synthetic construct
  misc_feature 1..25: note = Oligonucleotide
  source 1..25: mol_type = other DNA
atcaagaataggtaaatctatagtc

SEQ ID NO: 29295 - DNA, 25 bp, synthetic construct
  misc_feature 1..25: note = Oligonucleotide
  source 1..25: mol_type = other DNA
aatatcaagaataggtaaatctata

SEQ ID NO: 29296 - DNA, 25 bp, synthetic construct
  misc_feature 1..25: note = Oligonucleotide
  source 1..25: mol_type = other DNA
tgaaatatcaagaataggtaaatct

SEQ ID NO: 29297 - DNA, 25 bp, synthetic construct
  misc_feature 1..25: note = Oligonucleotide
  source 1..25: mol_type = other DNA
acatgaaatatcaagaataggtaaa

SEQ ID NO: 29298 - DNA, 25 bp, synthetic construct
  misc_feature 1..25: note = Oligonucleotide
  source 1..25: mol_type = other DNA
ttgacatgaaatatcaagaataggt

SEQ ID NO: 29299 - DNA, 25 bp, synthetic construct
  misc_feature 1..25: note = Oligonucleotide
  source 1..25: mol_type = other DNA
ccattgacatgaaatatcaagaata

SEQ ID NO: 29300 - DNA, 25 bp, synthetic construct
  misc_feature 1..25: note = Oligonucleotide
  source 1..25: mol_type = other DNA
attccattgacatgaaatatcaaga

SEQ ID NO: 29301 - DNA, 25 bp, synthetic construct
  misc_feature 1..25: note = Oligonucleotide
  source 1..25: mol_type = other DNA
atgattccattgacatgaaatatca

SEQ ID NO: 29302 - DNA, 25 bp, synthetic construct
  misc_feature 1..25: note = Oligonucleotide
  source 1..25: mol_type = other DNA
tatatgattccattgacatgaaata

SEQ ID NO: 29303 - DNA, 25 bp, synthetic construct
  misc_feature 1..25: note = Oligonucleotide
  source 1..25: mol_type = other DNA
tattatatgattccattgacatgaa

SEQ ID NO: 29304 - DNA, 25 bp, synthetic construct
  misc_feature 1..25: note = Oligonucleotide
  source 1..25: mol_type = other DNA
acttattatatgattccattgacat

SEQ ID NO: 29305 - DNA, 25 bp, synthetic construct
  misc_feature 1..25: note = Oligonucleotide
  source 1..25: mol_type = other DNA
gtcacttattatatgattccattga

SEQ ID NO: 29306 - DNA, 25 bp, synthetic construct
  misc_feature 1..25: note = Oligonucleotide
  source 1..25: mol_type = other DNA
agtgtcacttattatatgattccat

SEQ ID NO: 29307 - DNA, 25 bp, synthetic construct
  misc_feature 1..25: note = Oligonucleotide
  source 1..25: mol_type = other DNA
ctaagtgtcacttattatatgattc

SEQ ID NO: 29308 - DNA, 25 bp, synthetic construct
  misc_feature 1..25: note = Oligonucleotide
  source 1..25: mol_type = other DNA
acactaagtgtcacttattatatga

SEQ ID NO: 29309 - DNA, 25 bp, synthetic construct
  misc_feature 1..25: note = Oligonucleotide
  source 1..25: mol_type = other DNA
cagacactaagtgtcacttattata

SEQ ID NO: 29310 - DNA, 25 bp, synthetic construct
  misc_feature 1..25: note = Oligonucleotide
  source 1..25: mol_type = other DNA
agccagacactaagtgtcacttatt

SEQ ID NO: 29311 - DNA, 25 bp, synthetic construct
  misc_feature 1..25: note = Oligonucleotide
  source 1..25: mol_type = other DNA
agcagccagacactaagtgtcactt

SEQ ID NO: 29312 - DNA, 25 bp, synthetic construct
  misc_feature 1..25: note = Oligonucleotide
  source 1..25: mol_type = other DNA
aaaagcagccagacactaagtgtca

SEQ ID NO: 29313 - DNA, 25 bp, synthetic construct
  misc_feature 1..25: note = Oligonucleotide
  source 1..25: mol_type = other DNA
agtaaaagcagccagacactaagtg

SEQ ID NO: 29314 - DNA, 25 bp, synthetic construct
  misc_feature 1..25: note = Oligonucleotide
  source 1..25: mol_type = other DNA
ttgagtaaaagcagccagacactaa

SEQ ID NO: 29315 - DNA, 25 bp, synthetic construct
  misc_feature 1..25: note = Oligonucleotide
  source 1..25: mol_type = other DNA
atgttgagtaaaagcagccagacac

SEQ ID NO: 29316 - DNA, 25 bp, synthetic construct
  misc_feature 1..25: note = Oligonucleotide
  source 1..25: mol_type = other DNA
aacatgttgagtaaaagcagccaga

SEQ ID NO: 29317 - DNA, 25 bp, synthetic construct
  misc_feature 1..25: note = Oligonucleotide
  source 1..25: mol_type = other DNA
aaaaacatgttgagtaaaagcagcc

SEQ ID NO: 29318 - DNA, 25 bp, synthetic construct
  misc_feature 1..25: note = Oligonucleotide
  source 1..25: mol_type = other DNA
ctcaaaaacatgttgagtaaaagca

SEQ ID NO: 29319 - DNA, 25 bp, synthetic construct
  misc_feature 1..25: note = Oligonucleotide
  source 1..25: mol_type = other DNA
aagctcaaaaacatgttgagtaaaa

SEQ ID NO: 29320 - DNA, 25 bp, synthetic construct
  misc_feature 1..25: note = Oligonucleotide
  source 1..25: mol_type = other DNA
gtgaagctcaaaaacatgttgagta

SEQ ID NO: 29321 - DNA, 25 bp, synthetic construct
  misc_feature 1..25: note = Oligonucleotide
  source 1..25: mol_type = other DNA
aaggtgaagctcaaaaacatgttga

SEQ ID NO: 29322 - DNA, 25 bp, synthetic construct
  misc_feature 1..25: note = Oligonucleotide
  source 1..25: mol_type = other DNA
tacaaggtgaagctcaaaaacatgt

SEQ ID NO: 29323 - DNA, 25 bp, synthetic construct
  misc_feature 1..25: note = Oligonucleotide
  source 1..25: mol_type = other DNA
tcctacaaggtgaagctcaaaaaca

SEQ ID NO: 29324 - DNA, 25 bp, synthetic construct
  misc_feature 1..25: note = Oligonucleotide
  source 1..25: mol_type = other DNA
atatcctacaaggtgaagctcaaaa

SEQ ID NO: 29325 - DNA, 25 bp, synthetic construct
  misc_feature 1..25: note = Oligonucleotide
  source 1..25: mol_type = other DNA
gatatatcctacaaggtgaagctca

SEQ ID NO: 29326 - DNA, 25 bp, synthetic construct
  misc_feature 1..25: note = Oligonucleotide
  source 1..25: mol_type = other DNA
agtgatatatcctacaaggtgaagc

SEQ ID NO: 29327 - DNA, 25 bp, synthetic construct
  misc_feature 1..25: note = Oligonucleotide
  source 1..25: mol_type = other DNA
agcagtgatatatcctacaaggtga

SEQ ID NO: 29328 - DNA, 25 bp, synthetic construct
  misc_feature 1..25: note = Oligonucleotide
  source 1..25: mol_type = other DNA
tgaagcagtgatatatcctacaagg

SEQ ID NO: 29329 - DNA, 25 bp, synthetic construct
  misc_feature 1..25: note = Oligonucleotide
  source 1..25: mol_type = other DNA
gaatgaagcagtgatatatcctaca

SEQ ID NO: 29330 - DNA, 25 bp, synthetic construct
  misc_feature 1..25: note = Oligonucleotide
  source 1..25: mol_type = other DNA
aaggaatgaagcagtgatatatcct

SEQ ID NO: 29331 - DNA, 25 bp, synthetic construct
  misc_feature 1..25: note = Oligonucleotide
  source 1..25: mol_type = other DNA
aagaaggaatgaagcagtgatatat

SEQ ID NO: 29332 - DNA, 25 bp, synthetic construct
  misc_feature 1..25: note = Oligonucleotide
  source 1..25: mol_type = other DNA
cataagaaggaatgaagcagtgata

SEQ ID NO: 29333 - DNA, 25 bp, synthetic construct
  misc_feature 1..25: note = Oligonucleotide
  source 1..25: mol_type = other DNA
agccataagaaggaatgaagcagtg

SEQ ID NO: 29334 - DNA, 25 bp, synthetic construct
  misc_feature 1..25: note = Oligonucleotide
  source 1..25: mol_type = other DNA
ttcagccataagaaggaatgaagca

SEQ ID NO: 29335 - DNA, 25 bp, synthetic construct
  misc_feature 1..25: note = Oligonucleotide
  source 1..25: mol_type = other DNA
ttattcagccataagaaggaatgaa

SEQ ID NO: 29336 - DNA, 25 bp, synthetic construct
  misc_feature 1..25: note = Oligonucleotide
  source 1..25: mol_type = other DNA
atattattcagccataagaaggaat

SEQ ID NO: 29337 - DNA, 25 bp, synthetic construct
  misc_feature 1..25: note = Oligonucleotide
  source 1..25: mol_type = other DNA
gaaatattattcagccataagaagg

SEQ ID NO: 29338 - DNA, 25 bp, synthetic construct
  misc_feature 1..25: note = Oligonucleotide
  source 1..25: mol_type = other DNA
agtgaaatattattcagccataaga

SEQ ID NO: 29339 - DNA, 25 bp, synthetic construct
  misc_feature 1..25: note = Oligonucleotide
  source 1..25: mol_type = other DNA
aacagtgaaatattattcagccata

SEQ ID NO: 29340 - DNA, 25 bp, synthetic construct
  misc_feature 1..25: note = Oligonucleotide
  source 1..25: mol_type = other DNA
accaacagtgaaatattattcagcc

SEQ ID NO: 29341 - DNA, 25 bp, synthetic construct
  misc_feature 1..25: note = Oligonucleotide
  source 1..25: mol_type = other DNA
tataccaacagtgaaatattattca

SEQ ID NO: 29342 - DNA, 25 bp, synthetic construct
  misc_feature 1..25: note = Oligonucleotide
  source 1..25: mol_type = other DNA
atttataccaacagtgaaatattat

SEQ ID NO: 29343 - DNA, 25 bp, synthetic construct
  misc_feature 1..25: note = Oligonucleotide
  source 1..25: mol_type = other DNA
gtcatttataccaacagtgaaatat

SEQ ID NO: 29344 - DNA, 25 bp, synthetic construct
  misc_feature 1..25: note = Oligonucleotide
  source 1..25: mol_type = other DNA
aatgtcatttataccaacagtgaaa

SEQ ID NO: 29345 - DNA, 25 bp, synthetic construct
  misc_feature 1..25: note = Oligonucleotide
  source 1..25: mol_type = other DNA
caaaatgtcatttataccaacagtg

SEQ ID NO: 29346 - DNA, 25 bp, synthetic construct
  misc_feature 1..25: note = Oligonucleotide
  source 1..25: mol_type = other DNA
aaacaaaatgtcatttataccaaca

SEQ ID NO: 29347 - DNA, 25 bp, synthetic construct
  misc_feature 1..25: note = Oligonucleotide
  source 1..25: mol_type = other DNA
cataaacaaaatgtcatttatacca

SEQ ID NO: 29348 - DNA, 25 bp, synthetic construct
  misc_feature 1..25: note = Oligonucleotide
  source 1..25: mol_type = other DNA
atgcataaacaaaatgtcatttata

SEQ ID NO: 29349 - DNA, 25 bp, synthetic construct
  misc_feature 1..25: note = Oligonucleotide
  source 1..25: mol_type = other DNA
tgaatgcataaacaaaatgtcattt

SEQ ID NO: 29350 - DNA, 25 bp, synthetic construct
  misc_feature 1..25: note = Oligonucleotide
  source 1..25: mol_type = other DNA
agatgaatgcataaacaaaatgtca

SEQ ID NO: 29351 - DNA, 25 bp, synthetic construct
  misc_feature 1..25: note = Oligonucleotide
  source 1..25: mol_type = other DNA
gacagatgaatgcataaacaaaatg

SEQ ID NO: 29352 - DNA, 25 bp, synthetic construct
  misc_feature 1..25: note = Oligonucleotide
  source 1..25: mol_type = other DNA
attgacagatgaatgcataaacaaa

SEQ ID NO: 29353 - DNA, 25 bp, synthetic construct
  misc_feature 1..25: note = Oligonucleotide
  source 1..25: mol_type = other DNA
tccattgacagatgaatgcataaac

SEQ ID NO: 29354 - DNA, 25 bp, synthetic construct
  misc_feature 1..25: note = Oligonucleotide
  source 1..25: mol_type = other DNA
atatccattgacagatgaatgcata

SEQ ID NO: 29355 - DNA, 25 bp, synthetic construct
  misc_feature 1..25: note = Oligonucleotide
  source 1..25: mol_type = other DNA
cacatatccattgacagatgaatgc

SEQ ID NO: 29356 - DNA, 25 bp, synthetic construct
  misc_feature 1..25: note = Oligonucleotide
  source 1..25: mol_type = other DNA
acccacatatccattgacagatgaa

SEQ ID NO: 29357 - DNA, 25 bp, synthetic construct
  misc_feature 1..25: note = Oligonucleotide
  source 1..25: mol_type = other DNA
gaaacccacatatccattgacagat

SEQ ID NO: 29358 - DNA, 25 bp, synthetic construct
  misc_feature 1..25: note = Oligonucleotide
  source 1..25: mol_type = other DNA
gtagaaacccacatatccattgaca

SEQ ID NO: 29359 - DNA, 25 bp, synthetic construct
  misc_feature 1..25: note = Oligonucleotide
  source 1..25: mol_type = other DNA
aaggtagaaacccacatatccattg

SEQ ID NO: 29360 - DNA, 25 bp, synthetic construct
  misc_feature 1..25: note = Oligonucleotide
  source 1..25: mol_type = other DNA
caaaaggtagaaacccacatatcca

SEQ ID NO: 29361 - DNA, 25 bp, synthetic construct
  misc_feature 1..25: note = Oligonucleotide
  source 1..25: mol_type = other DNA
agtcaaaaggtagaaacccacatat

SEQ ID NO: 29362 - DNA, 25 bp, synthetic construct
  misc_feature 1..25: note = Oligonucleotide
  source 1..25: mol_type = other DNA
aacagtcaaaaggtagaaacccaca

SEQ ID NO: 29363 - DNA, 25 bp, synthetic construct
  misc_feature 1..25: note = Oligonucleotide
  source 1..25: mol_type = other DNA
caaaacagtcaaaaggtagaaaccc

SEQ ID NO: 29364 - DNA, 25 bp, synthetic construct
  misc_feature 1..25: note = Oligonucleotide
  source 1..25: mol_type = other DNA
attcaaaacagtcaaaaggtagaaa

SEQ ID NO: 29365 - DNA, 25 bp, synthetic construct
  misc_feature 1..25: note = Oligonucleotide
  source 1..25: mol_type = other DNA
aatattcaaaacagtcaaaaggtag

SEQ ID NO: 29366 - DNA, 25 bp, synthetic construct
  misc_feature 1..25: note = Oligonucleotide
  source 1..25: mol_type = other DNA
agcaatattcaaaacagtcaaaagg

SEQ ID NO: 29367 - DNA, 25 bp, synthetic construct
  misc_feature 1..25: note = Oligonucleotide
  source 1..25: mol_type = other DNA
agcagcaatattcaaaacagtcaaa

SEQ ID NO: 29368 - DNA, 25 bp, synthetic construct
  misc_feature 1..25: note = Oligonucleotide
  source 1..25: mol_type = other DNA
gacagcagcaatattcaaaacagtc

SEQ ID NO: 29369 - DNA, 25 bp, synthetic construct
  misc_feature 1..25: note = Oligonucleotide
  source 1..25: mol_type = other DNA
gttgacagcagcaatattcaaaaca

SEQ ID NO: 29370 - DNA, 25 bp, synthetic construct
  misc_feature 1..25: note = Oligonucleotide
  source 1..25: mol_type = other DNA
catgttgacagcagcaatattcaaa

SEQ ID NO: 29371 - DNA, 25 bp, synthetic construct
  misc_feature 1..25: note = Oligonucleotide
  source 1..25: mol_type = other DNA
acacatgttgacagcagcaatattc

SEQ ID NO: 29372 - DNA, 25 bp, synthetic construct
  misc_feature 1..25: note = Oligonucleotide
  source 1..25: mol_type = other DNA
tacacacatgttgacagcagcaata

SEQ ID NO: 29373 - DNA, 25 bp, synthetic construct
  misc_feature 1..25: note = Oligonucleotide
  source 1..25: mol_type = other DNA
atgtacacacatgttgacagcagca

SEQ ID NO: 29374 - DNA, 25 bp, synthetic construct
  misc_feature 1..25: note = Oligonucleotide
  source 1..25: mol_type = other DNA
tacatgtacacacatgttgacagca

SEQ ID NO: 29375 - DNA, 25 bp, synthetic construct
  misc_feature 1..25: note = Oligonucleotide
  source 1..25: mol_type = other DNA
aagtacatgtacacacatgttgaca

SEQ ID NO: 29376 - DNA, 25 bp, synthetic construct
  misc_feature 1..25: note = Oligonucleotide
  source 1..25: mol_type = other DNA
aacaagtacatgtacacacatgttg

SEQ ID NO: 29377 - DNA, 25 bp, synthetic construct
  misc_feature 1..25: note = Oligonucleotide
  source 1..25: mol_type = other DNA
tcaaacaagtacatgtacacacatg

SEQ ID NO: 29378 - DNA, 25 bp, synthetic construct
  misc_feature 1..25: note = Oligonucleotide
  source 1..25: mol_type = other DNA
tattcaaacaagtacatgtacacac

SEQ ID NO: 29379 - DNA, 25 bp, synthetic construct
  misc_feature 1..25: note = Oligonucleotide
  source 1..25: mol_type = other DNA
agatattcaaacaagtacatgtaca

SEQ ID NO: 29380 - DNA, 25 bp, synthetic construct
  misc_feature 1..25: note = Oligonucleotide
  source 1..25: mol_type = other DNA
aatagatattcaaacaagtacatgt

SEQ ID NO: 29381 - DNA, 25 bp, synthetic construct
  misc_feature 1..25: note = Oligonucleotide
  source 1..25: mol_type = other DNA
gaaaatagatattcaaacaagtaca

SEQ ID NO: 29382 - DNA, 25 bp, synthetic construct
  misc_feature 1..25: note = Oligonucleotide
  source 1..25: mol_type = other DNA
attgaaaatagatattcaaacaagt

SEQ ID NO: 29383 - DNA, 25 bp, synthetic construct
  misc_feature 1..25: note = Oligonucleotide
  source 1..25: mol_type = other DNA
gagattgaaaatagatattcaaaca

SEQ ID NO: 29384 - DNA, 25 bp, synthetic construct
  misc_feature 1..25: note = Oligonucleotide
  source 1..25: mol_type = other DNA
taagagattgaaaatagatattcaa

SEQ ID NO: 29385 - DNA, 25 bp, synthetic construct
  misc_feature 1..25: note = Oligonucleotide
  source 1..25: mol_type = other DNA
acctaagagattgaaaatagatatt

SEQ ID NO: 29386 - DNA, 25 bp, synthetic construct
  misc_feature 1..25: note = Oligonucleotide
  source 1..25: mol_type = other DNA
tatacctaagagattgaaaatagat

SEQ ID NO: 29387 - DNA, 25 bp, synthetic construct
  misc_feature 1..25: note = Oligonucleotide
  source 1..25: mol_type = other DNA
gtatatacctaagagattgaaaata

SEQ ID NO: 29388 - DNA, 25 bp, synthetic construct
  misc_feature 1..25: note = Oligonucleotide
  source 1..25: mol_type = other DNA
taggtatatacctaagagattgaaa

SEQ ID NO: 29389 - DNA, 25 bp, synthetic construct
  misc_feature 1..25: note = Oligonucleotide
  source 1..25: mol_type = other DNA
tcttaggtatatacctaagagattg

SEQ ID NO: 29390 - DNA, 25 bp, synthetic construct
  misc_feature 1..25: note = Oligonucleotide
  source 1..25: mol_type = other DNA
cattcttaggtatatacctaagaga

SEQ ID NO: 29391 - DNA, 25 bp, synthetic construct
  misc_feature 1..25: note = Oligonucleotide
  source 1..25: mol_type = other DNA
ttccattcttaggtatatacctaag

SEQ ID NO: 29392 - DNA, 25 bp, synthetic construct
  misc_feature 1..25: note = Oligonucleotide
  source 1..25: mol_type = other DNA
aaattccattcttaggtatatacct

SEQ ID NO: 29393 - DNA, 25 bp, synthetic construct
  misc_feature 1..25: note = Oligonucleotide
  source 1..25: mol_type = other DNA
ccaaaattccattcttaggtatata

SEQ ID NO: 29394 - DNA, 25 bp, synthetic construct
  misc_feature 1..25: note = Oligonucleotide
  source 1..25: mol_type = other DNA
attccaaaattccattcttaggtat

SEQ ID NO: 29395 - DNA, 25 bp, synthetic construct
  misc_feature 1..25: note = Oligonucleotide
  source 1..25: mol_type = other DNA
atgattccaaaattccattcttagg

SEQ ID NO: 29396 - DNA, 25 bp, synthetic construct
  misc_feature 1..25: note = Oligonucleotide
  source 1..25: mol_type = other DNA
catatgattccaaaattccattctt

SEQ ID NO: 29397 - DNA, 25 bp, synthetic construct
  misc_feature 1..25: note = Oligonucleotide
  source 1..25: mol_type = other DNA
tatcatatgattccaaaattccatt

SEQ ID NO: 29398 - DNA, 25 bp, synthetic construct
  misc_feature 1..25: note = Oligonucleotide
  source 1..25: mol_type = other DNA
aattatcatatgattccaaaattcc

SEQ ID NO: 29399 - DNA, 25 bp, synthetic construct
  misc_feature 1..25: note = Oligonucleotide
  source 1..25: mol_type = other DNA
tagaattatcatatgattccaaaat

SEQ ID NO: 29400 - DNA, 25 bp, synthetic construct
  misc_feature 1..25: note = Oligonucleotide
  source 1..25: mol_type = other DNA
acatagaattatcatatgattccaa

SEQ ID NO: 29401 - DNA, 25 bp, synthetic construct
  misc_feature 1..25: note = Oligonucleotide
  source 1..25: mol_type = other DNA
taaacatagaattatcatatgattc

SEQ ID NO: 29402 - DNA, 25 bp, synthetic construct
  misc_feature 1..25: note = Oligonucleotide
  source 1..25: mol_type = other DNA
agttaaacatagaattatcatatga

SEQ ID NO: 29403 - DNA, 25 bp, synthetic construct
  misc_feature 1..25: note = Oligonucleotide
  source 1..25: mol_type = other DNA
agaagttaaacatagaattatcata

SEQ ID NO: 29404 - DNA, 25 bp, synthetic construct
  misc_feature 1..25: note = Oligonucleotide
  source 1..25: mol_type = other DNA
tcaagaagttaaacatagaattatc

SEQ ID NO: 29405 - DNA, 25 bp, synthetic construct
  misc_feature 1..25: note = Oligonucleotide
  source 1..25: mol_type = other DNA
tcctcaagaagttaaacatagaatt

SEQ ID NO: 29406 - DNA, 25 bp, synthetic construct
  misc_feature 1..25: note = Oligonucleotide
  source 1..25: mol_type = other DNA
agttcctcaagaagttaaacataga

SEQ ID NO: 29407 - DNA, 25 bp, synthetic construct
  misc_feature 1..25: note = Oligonucleotide
  source 1..25: mol_type = other DNA
ggcagttcctcaagaagttaaacat

SEQ ID NO: 29408 - DNA, 25 bp, synthetic construct
  misc_feature 1..25: note = Oligonucleotide
  source 1..25: mol_type = other DNA
tttggcagttcctcaagaagttaaa

SEQ ID NO: 29409 - DNA, 25 bp, synthetic construct
  misc_feature 1..25: note = Oligonucleotide
  source 1..25: mol_type = other DNA
cagtttggcagttcctcaagaagtt

SEQ ID NO: 29410 - DNA, 25 bp, synthetic construct
  misc_feature 1..25: note = Oligonucleotide
  source 1..25: mol_type = other DNA
aaacagtttggcagttcctcaagaa

SEQ ID NO: 29411 - DNA, 25 bp, synthetic construct
  misc_feature 1..25: note = Oligonucleotide
  source 1..25: mol_type = other DNA
ggaaaacagtttggcagttcctcaa

SEQ ID NO: 29412 - DNA, 25 bp, synthetic construct
  misc_feature 1..25: note = Oligonucleotide
  source 1..25: mol_type = other DNA
ggtggaaaacagtttggcagttcct

SEQ ID NO: 29413 - DNA, 25 bp, synthetic construct
  misc_feature 1..25: note = Oligonucleotide
  source 1..25: mol_type = other DNA
aatggtggaaaacagtttggcagtt

SEQ ID NO: 29414 - DNA, 25 bp, synthetic construct
  misc_feature 1..25: note = Oligonucleotide
  source 1..25: mol_type = other DNA
caaaatggtggaaaacagtttggca

SEQ ID NO: 29415 - DNA, 25 bp, synthetic construct
  misc_feature 1..25: note = Oligonucleotide
  source 1..25: mol_type = other DNA
atgcaaaatggtggaaaacagtttg

SEQ ID NO: 29416 - DNA, 25 bp, synthetic construct
  misc_feature 1..25: note = Oligonucleotide
  source 1..25: mol_type = other DNA
ggaatgcaaaatggtggaaaacagt

SEQ ID NO: 29417 - DNA, 25 bp, synthetic construct
  misc_feature 1..25: note = Oligonucleotide
  source 1..25: mol_type = other DNA
gtgggaatgcaaaatggtggaaaac

SEQ ID NO: 29418 - DNA, 25 bp, synthetic construct
  misc_feature 1..25: note = Oligonucleotide
  source 1..25: mol_type = other DNA
ctggtgggaatgcaaaatggtggaa

SEQ ID NO: 29419 - DNA, 25 bp, synthetic construct
  misc_feature 1..25: note = Oligonucleotide
  source 1..25: mol_type = other DNA
tcactggtgggaatgcaaaatggtg

SEQ ID NO: 29420 - DNA, 25 bp, synthetic construct
  misc_feature 1..25: note = Oligonucleotide
  source 1..25: mol_type = other DNA
acatcactggtgggaatgcaaaatg

SEQ ID NO: 29421 - DNA, 25 bp, synthetic construct
  misc_feature 1..25: note = Oligonucleotide
  source 1..25: mol_type = other DNA
catacatcactggtgggaatgcaaa

SEQ ID NO: 29422 - DNA, 25 bp, synthetic construct
  misc_feature 1..25: note = Oligonucleotide
  source 1..25: mol_type = other DNA
cctcatacatcactggtgggaatgc

SEQ ID NO: 29423 - DNA, 25 bp, synthetic construct
  misc_feature 1..25: note = Oligonucleotide
  source 1..25: mol_type = other DNA
aagcctcatacatcactggtgggaa

SEQ ID NO: 29424 - DNA, 25 bp, synthetic construct
  misc_feature 1..25: note = Oligonucleotide
  source 1..25: mol_type = other DNA
cggaagcctcatacatcactggtgg

SEQ ID NO: 29425 - DNA, 25 bp, synthetic construct
  misc_feature 1..25: note = Oligonucleotide
  source 1..25: mol_type = other DNA
aaccggaagcctcatacatcactgg

SEQ ID NO: 29426 - DNA, 25 bp, synthetic construct
  misc_feature 1..25: note = Oligonucleotide
  source 1..25: mol_type = other DNA
aaaaaccggaagcctcatacatcac

SEQ ID NO: 29427 - DNA, 25 bp, synthetic construct
  misc_feature 1..25: note = Oligonucleotide
  source 1..25: mol_type = other DNA
tgaaaaaaccggaagcctcatacat

SEQ ID NO: 29428 - DNA, 25 bp, synthetic construct
  misc_feature 1..25: note = Oligonucleotide
  source 1..25: mol_type = other DNA
atgtgaaaaaaccggaagcctcata

SEQ ID NO: 29429 - DNA, 25 bp, synthetic construct
  misc_feature 1..25: note = Oligonucleotide
  source 1..25: mol_type = other DNA
aagatgtgaaaaaaccggaagcctc

SEQ ID NO: 29430 - DNA, 25 bp, synthetic construct
  misc_feature 1..25: note = Oligonucleotide
  source 1..25: mol_type = other DNA
gtgaagatgtgaaaaaaccggaagc

SEQ ID NO: 29431 - DNA, 25 bp, synthetic construct
  misc_feature 1..25: note = Oligonucleotide
  source 1..25: mol_type = other DNA
ttggtgaagatgtgaaaaaaccgga

SEQ ID NO: 29432 - DNA, 25 bp, synthetic construct
  misc_feature 1..25: note = Oligonucleotide
  source 1..25: mol_type = other DNA
ctgttggtgaagatgtgaaaaaacc

SEQ ID NO: 29433 - DNA, 25 bp, synthetic construct
  misc_feature 1..25: note = Oligonucleotide
  source 1..25: mol_type = other DNA
caactgttggtgaagatgtgaaaaa

SEQ ID NO: 29434 - DNA, 25 bp, synthetic construct
  misc_feature 1..25: note = Oligonucleotide
  source 1..25: mol_type = other DNA
taacaactgttggtgaagatgtgaa

SEQ ID NO: 29435 - DNA, 25 bp, synthetic construct
  misc_feature 1..25: note = Oligonucleotide
  source 1..25: mol_type = other DNA
tagtaacaactgttggtgaagatgt

SEQ ID NO: 29436 - DNA, 25 bp, synthetic construct
  misc_feature 1..25: note = Oligonucleotide
  source 1..25: mol_type = other DNA
agatagtaacaactgttggtgaaga

SEQ ID NO: 29437 - DNA, 25 bp, synthetic construct
  misc_feature 1..25: note = Oligonucleotide
  source 1..25: mol_type = other DNA
aaaagatagtaacaactgttggtga

SEQ ID NO: 29438 - DNA, 25 bp, synthetic construct
  misc_feature 1..25: note = Oligonucleotide
  source 1..25: mol_type = other DNA
aaaaaaagatagtaacaactgttgg

SEQ ID NO: 29439 - DNA, 25 bp, synthetic construct
  misc_feature 1..25: note = Oligonucleotide
  source 1..25: mol_type = other DNA
aaaaaaaaaagatagtaacaactgt

SEQ ID NO: 29440 - DNA, 25 bp, synthetic construct
  misc_feature 1..25: note = Oligonucleotide
  source 1..25: mol_type = other DNA
gtcaaaaaaaaaagatagtaacaac

SEQ ID NO: 29441 - DNA, 25 bp, synthetic construct
  misc_feature 1..25: note = Oligonucleotide
  source 1..25: mol_type = other DNA
acggtcaaaaaaaaaagatagtaac

SEQ ID NO: 29442 - DNA, 25 bp, synthetic construct
  misc_feature 1..25: note = Oligonucleotide
  source 1..25: mol_type = other DNA
gctacggtcaaaaaaaaaagatagt

SEQ ID NO: 29443 - DNA, 25 bp, synthetic construct
  misc_feature 1..25: note = Oligonucleotide
  source 1..25: mol_type = other DNA
atggctacggtcaaaaaaaaaagat

SEQ ID NO: 29444 - DNA, 25 bp, synthetic construct
  misc_feature 1..25: note = Oligonucleotide
  source 1..25: mol_type = other DNA
aggatggctacggtcaaaaaaaaaa

SEQ ID NO: 29445 - DNA, 25 bp, synthetic construct
  misc_feature 1..25: note = Oligonucleotide
  source 1..25: mol_type = other DNA
actaggatggctacggtcaaaaaaa

SEQ ID NO: 29446 - DNA, 25 bp, synthetic construct
  misc_feature 1..25: note = Oligonucleotide
  source 1..25: mol_type = other DNA
cttactaggatggctacggtcaaaa

SEQ ID NO: 29447 - DNA, 25 bp, synthetic construct
  misc_feature 1..25: note = Oligonucleotide
  source 1..25: mol_type = other DNA
acacttactaggatggctacggtca

SEQ ID NO: 29448 - DNA, 25 bp, synthetic construct
  misc_feature 1..25: note = Oligonucleotide
  source 1..25: mol_type = other DNA
ttcacacttactaggatggctacgg

SEQ ID NO: 29449 - DNA, 25 bp, synthetic construct
  misc_feature 1..25: note = Oligonucleotide
  source 1..25: mol_type = other DNA
catttcacacttactaggatggcta

SEQ ID NO: 29450 - DNA, 25 bp, synthetic construct
  misc_feature 1..25: note = Oligonucleotide
  source 1..25: mol_type = other DNA
taccatttcacacttactaggatgg

SEQ ID NO: 29451 - DNA, 25 bp, synthetic construct
  misc_feature 1..25: note = Oligonucleotide
  source 1..25: mol_type = other DNA
aaataccatttcacacttactagga

SEQ ID NO: 29452 - DNA, 25 bp, synthetic construct
  misc_feature 1..25: note = Oligonucleotide
  source 1..25: mol_type = other DNA
atgaaataccatttcacacttacta

SEQ ID NO: 29453 - DNA, 25 bp, synthetic construct
  misc_feature 1..25: note = Oligonucleotide
  source 1..25: mol_type = other DNA
acaatgaaataccatttcacactta

SEQ ID NO: 29454 - DNA, 25 bp, synthetic construct
  misc_feature 1..25: note = Oligonucleotide
  source 1..25: mol_type = other DNA
atcacaatgaaataccatttcacac

SEQ ID NO: 29455 - DNA, 25 bp, synthetic construct
  misc_feature 1..25: note = Oligonucleotide
  source 1..25: mol_type = other DNA
aaaatcacaatgaaataccatttca

SEQ ID NO: 29456 - DNA, 25 bp, synthetic construct
  misc_feature 1..25: note = Oligonucleotide
  source 1..25: mol_type = other DNA
gtcaaaatcacaatgaaataccatt

SEQ ID NO: 29457 - DNA, 25 bp, synthetic construct
  misc_feature 1..25: note = Oligonucleotide
  source 1..25: mol_type = other DNA
caagtcaaaatcacaatgaaatacc

SEQ ID NO: 29458 - DNA, 25 bp, synthetic construct
  misc_feature 1..25: note = Oligonucleotide
  source 1..25: mol_type = other DNA
atacaagtcaaaatcacaatgaaat

SEQ ID NO: 29459 - DNA, 25 bp, synthetic construct
  misc_feature 1..25: note = Oligonucleotide
  source 1..25: mol_type = other DNA
gaaatacaagtcaaaatcacaatga

SEQ ID NO: 29460 - DNA, 25 bp, synthetic construct
  misc_feature 1..25: note = Oligonucleotide
  source 1..25: mol_type = other DNA
agggaaatacaagtcaaaatcacaa

SEQ ID NO: 29461 - DNA, 25 bp, synthetic construct
  misc_feature 1..25: note = Oligonucleotide
  source 1..25: mol_type = other DNA
actagggaaatacaagtcaaaatca

SEQ ID NO: 29462 - DNA, 25 bp, synthetic construct
  misc_feature 1..25: note = Oligonucleotide
  source 1..25: mol_type = other DNA
gtcactagggaaatacaagtcaaaa

SEQ ID NO: 29463 - DNA, 25 bp, synthetic construct
  misc_feature 1..25: note = Oligonucleotide
  source 1..25: mol_type = other DNA
ttagtcactagggaaatacaagtca

SEQ ID NO: 29464 - DNA, 25 bp, synthetic construct
  misc_feature 1..25: note = Oligonucleotide
  source 1..25: mol_type = other DNA
tcattagtcactagggaaatacaag

SEQ ID NO: 29465 - DNA, 25 bp, synthetic construct
  misc_feature 1..25: note = Oligonucleotide
  source 1..25: mol_type = other DNA
acatcattagtcactagggaaatac

SEQ ID NO: 29466 - DNA, 25 bp, synthetic construct
  misc_feature 1..25: note = Oligonucleotide
  source 1..25: mol_type = other DNA
aaaacatcattagtcactagggaaa

SEQ ID NO: 29467 - DNA, 25 bp, synthetic construct
  misc_feature 1..25: note = Oligonucleotide
  source 1..25: mol_type = other DNA
tgcaaaacatcattagtcactaggg

SEQ ID NO: 29468 - DNA, 25 bp, synthetic construct
  misc_feature 1..25: note = Oligonucleotide
  source 1..25: mol_type = other DNA
agatgcaaaacatcattagtcacta

SEQ ID NO: 29469 - DNA, 25 bp, synthetic construct
  misc_feature 1..25: note = Oligonucleotide
  source 1..25: mol_type = other DNA
aaaagatgcaaaacatcattagtca

SEQ ID NO: 29470 - DNA, 25 bp, synthetic construct
  misc_feature 1..25: note = Oligonucleotide
  source 1..25: mol_type = other DNA
atgaaaagatgcaaaacatcattag

SEQ ID NO: 29471 - DNA, 25 bp, synthetic construct
  misc_feature 1..25: note = Oligonucleotide
  source 1..25: mol_type = other DNA
cacatgaaaagatgcaaaacatcat

SEQ ID NO: 29472 - DNA, 25 bp, synthetic construct
  misc_feature 1..25: note = Oligonucleotide
  source 1..25: mol_type = other DNA
aagcacatgaaaagatgcaaaacat

SEQ ID NO: 29473 - DNA, 25 bp, synthetic construct
  misc_feature 1..25: note = Oligonucleotide
  source 1..25: mol_type = other DNA
aataagcacatgaaaagatgcaaaa

SEQ ID NO: 29474 - DNA, 25 bp, synthetic construct
  misc_feature 1..25: note = Oligonucleotide
  source 1..25: mol_type = other DNA
cccaataagcacatgaaaagatgca

SEQ ID NO: 29475 - DNA, 25 bp, synthetic construct
  misc_feature 1..25: note = Oligonucleotide
  source 1..25: mol_type = other DNA
atgcccaataagcacatgaaaagat

SEQ ID NO: 29476 - DNA, 25 bp, synthetic construct
  misc_feature 1..25: note = Oligonucleotide
  source 1..25: mol_type = other DNA
caaatgcccaataagcacatgaaaa

SEQ ID NO: 29477 - DNA, 25 bp, synthetic construct
  misc_feature 1..25: note = Oligonucleotide
  source 1..25: mol_type = other DNA
atacaaatgcccaataagcacatga

SEQ ID NO: 29478 - DNA, 25 bp, synthetic construct
  misc_feature 1..25: note = Oligonucleotide
  source 1..25: mol_type = other DNA
gatatacaaatgcccaataagcaca

SEQ ID NO: 29479 - DNA, 25 bp, synthetic construct
  misc_feature 1..25: note = Oligonucleotide
  source 1..25: mol_type = other DNA
gaagatatacaaatgcccaataagc

SEQ ID NO: 29480 - DNA, 25 bp, synthetic construct
  misc_feature 1..25: note = Oligonucleotide
  source 1..25: mol_type = other DNA
aaagaagatatacaaatgcccaata

SEQ ID NO: 29481 - DNA, 25 bp, synthetic construct
  misc_feature 1..25: note = Oligonucleotide
  source 1..25: mol_type = other DNA
tccaaagaagatatacaaatgccca

SEQ ID NO: 29482 - DNA, 25 bp, synthetic construct
  misc_feature 1..25: note = Oligonucleotide
  source 1..25: mol_type = other DNA
ttctccaaagaagatatacaaatgc

SEQ ID NO: 29483 - DNA, 25 bp, synthetic construct
  misc_feature 1..25: note = Oligonucleotide
  source 1..25: mol_type = other DNA
cttttctccaaagaagatatacaaa

SEQ ID NO: 29484 - DNA, 25 bp, synthetic construct
  misc_feature 1..25: note = Oligonucleotide
  source 1..25: mol_type = other DNA
tgacttttctccaaagaagatatac

SEQ ID NO: 29485 - DNA, 25 bp, synthetic construct
  misc_feature 1..25: note = Oligonucleotide
  source 1..25: mol_type = other DNA
acttgacttttctccaaagaagata

SEQ ID NO: 29486 - DNA, 25 bp, synthetic construct
  misc_feature 1..25: note = Oligonucleotide
  source 1..25: mol_type = other DNA
aggacttgacttttctccaaagaag

SEQ ID NO: 29487 - DNA, 25 bp, synthetic construct
  misc_feature 1..25: note = Oligonucleotide
  source 1..25: mol_type = other DNA
caaaggacttgacttttctccaaag

SEQ ID NO: 29488 - DNA, 25 bp, synthetic construct
  misc_feature 1..25: note = Oligonucleotide
  source 1..25: mol_type = other DNA
ggacaaaggacttgacttttctcca

SEQ ID NO: 29489 - DNA, 25 bp, synthetic construct
  misc_feature 1..25: note = Oligonucleotide
  source 1..25: mol_type = other DNA
aatggacaaaggacttgacttttct

SEQ ID NO: 29490 - DNA, 25 bp, synthetic construct
  misc_feature 1..25: note = Oligonucleotide
  source 1..25: mol_type = other DNA
aaaaatggacaaaggacttgacttt

SEQ ID NO: 29491 - DNA, 25 bp, synthetic construct
  misc_feature 1..25: note = Oligonucleotide
  source 1..25: mol_type = other DNA
tttaaaaatggacaaaggacttgac

SEQ ID NO: 29492 - DNA, 25 bp, synthetic construct
  misc_feature 1..25: note = Oligonucleotide
  source 1..25: mol_type = other DNA
caatttaaaaatggacaaaggactt

SEQ ID NO: 29493 - DNA, 25 bp, synthetic construct
  misc_feature 1..25: note = Oligonucleotide
  source 1..25: mol_type = other DNA
acccaatttaaaaatggacaaagga

SEQ ID NO: 29494 - DNA, 25 bp, synthetic construct
  misc_feature 1..25: note = Oligonucleotide
  source 1..25: mol_type = other DNA
atgacccaatttaaaaatggacaaa

SEQ ID NO: 29495 - DNA, 25 bp, synthetic construct
  misc_feature 1..25: note = Oligonucleotide
  source 1..25: mol_type = other DNA
taaatgacccaatttaaaaatggac

SEQ ID NO: 29496 - DNA, 25 bp, synthetic construct
  misc_feature 1..25: note = Oligonucleotide
  source 1..25: mol_type = other DNA
aaataaatgacccaatttaaaaatg

SEQ ID NO: 29497 - DNA, 25 bp, synthetic construct
  misc_feature 1..25: note = Oligonucleotide
  source 1..25: mol_type = other DNA
caaaaataaatgacccaatttaaaa

SEQ ID NO: 29498 - DNA, 25 bp, synthetic construct
  misc_feature 1..25: note = Oligonucleotide
  source 1..25: mol_type = other DNA
caacaaaaataaatgacccaattta

SEQ ID NO: 29499 - DNA, 25 bp, synthetic construct
  misc_feature 1..25: note = Oligonucleotide
  source 1..25: mol_type = other DNA
caacaacaaaaataaatgacccaat

SEQ ID NO: 29500 - DNA, 25 bp, synthetic construct
  misc_feature 1..25: note = Oligonucleotide
  source 1..25: mol_type = other DNA
actcaacaacaaaaataaatgaccc

SEQ ID NO: 29501 - DNA, 25 bp, synthetic construct
  misc_feature 1..25: note = Oligonucleotide
  source 1..25: mol_type = other DNA
acaactcaacaacaaaaataaatga

SEQ ID NO: 29502 - DNA, 25 bp, synthetic construct
  misc_feature 1..25: note = Oligonucleotide
  source 1..25: mol_type = other DNA
cttacaactcaacaacaaaaataaa

SEQ ID NO: 29503 - DNA, 25 bp, synthetic construct
  misc_feature 1..25: note = Oligonucleotide
  source 1..25: mol_type = other DNA
acccttacaactcaacaacaaaaat

SEQ ID NO: 29504 - DNA, 25 bp, synthetic construct
  misc_feature 1..25: note = Oligonucleotide
  source 1..25: mol_type = other DNA
agaacccttacaactcaacaacaaa

SEQ ID NO: 29505 - DNA, 25 bp, synthetic construct
  misc_feature 1..25: note = Oligonucleotide
  source 1..25: mol_type = other DNA
taaagaacccttacaactcaacaac

SEQ ID NO: 29506 - DNA, 25 bp, synthetic construct
  misc_feature 1..25: note = Oligonucleotide
  source 1..25: mol_type = other DNA
atataaagaacccttacaactcaac

SEQ ID NO: 29507 - DNA, 25 bp, synthetic construct
  misc_feature 1..25: note = Oligonucleotide
  source 1..25: mol_type = other DNA
aatatataaagaacccttacaactc

SEQ ID NO: 29508 - DNA, 25 bp, synthetic construct
  misc_feature 1..25: note = Oligonucleotide
  source 1..25: mol_type = other DNA
cagaatatataaagaacccttacaa

SEQ ID NO: 29509 - DNA, 25 bp, synthetic construct
  misc_feature 1..25: note = Oligonucleotide
  source 1..25: mol_type = other DNA
attcagaatatataaagaaccctta

SEQ ID NO: 29510 - DNA, 25 bp, synthetic construct
  misc_feature 1..25: note = Oligonucleotide
  source 1..25: mol_type = other DNA
agtattcagaatatataaagaaccc

SEQ ID NO: 29511 - DNA, 25 bp, synthetic construct
  misc_feature 1..25: note = Oligonucleotide
  source 1..25: mol_type = other DNA
tttagtattcagaatatataaagaa

SEQ ID NO: 29512 - DNA, 25 bp, synthetic construct
  misc_feature 1..25: note = Oligonucleotide
  source 1..25: mol_type = other DNA
aagtttagtattcagaatatataaa

SEQ ID NO: 29513 - DNA, 25 bp, synthetic construct
  misc_feature 1..25: note = Oligonucleotide
  source 1..25: mol_type = other DNA
cacaagtttagtattcagaatatat

SEQ ID NO: 29514 - DNA, 25 bp, synthetic construct
  misc_feature 1..25: note = Oligonucleotide
  source 1..25: mol_type = other DNA
ccacacaagtttagtattcagaata

SEQ ID NO: 29515 - DNA, 25 bp, synthetic construct
  misc_feature 1..25: note = Oligonucleotide
  source 1..25: mol_type = other DNA
attccacacaagtttagtattcaga

SEQ ID NO: 29516 - DNA, 25 bp, synthetic construct
  misc_feature 1..25: note = Oligonucleotide
  source 1..25: mol_type = other DNA
catattccacacaagtttagtattc

SEQ ID NO: 29517 - DNA, 25 bp, synthetic construct
  misc_feature 1..25: note = Oligonucleotide
  source 1..25: mol_type = other DNA
tcacatattccacacaagtttagta

SEQ ID NO: 29518 - DNA, 25 bp, synthetic construct
  misc_feature 1..25: note = Oligonucleotide
  source 1..25: mol_type = other DNA
aaatcacatattccacacaagttta

SEQ ID NO: 29519 - DNA, 25 bp, synthetic construct
  misc_feature 1..25: note = Oligonucleotide
  source 1..25: mol_type = other DNA
tacaaatcacatattccacacaagt

SEQ ID NO: 29520 - DNA, 25 bp, synthetic construct
  misc_feature 1..25: note = Oligonucleotide
  source 1..25: mol_type = other DNA
atttacaaatcacatattccacaca

SEQ ID NO: 29521 - DNA, 25 bp, synthetic construct
  misc_feature 1..25: note = Oligonucleotide
  source 1..25: mol_type = other DNA
aatatttacaaatcacatattccac

SEQ ID NO: 29522 - DNA, 25 bp, synthetic construct
  misc_feature 1..25: note = Oligonucleotide
  source 1..25: mol_type = other DNA
gaaaatatttacaaatcacatattc

SEQ ID NO: 29523 - DNA, 25 bp, synthetic construct
  misc_feature 1..25: note = Oligonucleotide
  source 1..25: mol_type = other DNA
agagaaaatatttacaaatcacata

SEQ ID NO: 29524 - DNA, 25 bp, synthetic construct
  misc_feature 1..25: note = Oligonucleotide
  source 1..25: mol_type = other DNA
tacagagaaaatatttacaaatcac

SEQ ID NO: 29525 - DNA, 25 bp, synthetic construct
  misc_feature 1..25: note = Oligonucleotide
  source 1..25: mol_type = other DNA
ttctacagagaaaatatttacaaat

SEQ ID NO: 29526 - DNA, 25 bp, synthetic construct
  misc_feature 1..25: note = Oligonucleotide
  source 1..25: mol_type = other DNA
ctattctacagagaaaatatttaca

SEQ ID NO: 29527 - DNA, 25 bp, synthetic construct
  misc_feature 1..25: note = Oligonucleotide
  source 1..25: mol_type = other DNA
ctcctattctacagagaaaatattt

SEQ ID NO: 29528 - DNA, 25 bp, synthetic construct
  misc_feature 1..25: note = Oligonucleotide
  source 1..25: mol_type = other DNA
gatctcctattctacagagaaaata

SEQ ID NO: 29529 - DNA, 25 bp, synthetic construct
  misc_feature 1..25: note = Oligonucleotide
  source 1..25: mol_type = other DNA
aaggatctcctattctacagagaaa

SEQ ID NO: 29530 - DNA, 25 bp, synthetic construct
  misc_feature 1..25: note = Oligonucleotide
  source 1..25: mol_type = other DNA
gacaaggatctcctattctacagag

SEQ ID NO: 29531 - DNA, 25 bp, synthetic construct
  misc_feature 1..25: note = Oligonucleotide
  source 1..25: mol_type = other DNA
agtgacaaggatctcctattctaca

SEQ ID NO: 29532 - DNA, 25 bp, synthetic construct
  misc_feature 1..25: note = Oligonucleotide
  source 1..25: mol_type = other DNA
aaaagtgacaaggatctcctattct

SEQ ID NO: 29533 - DNA, 25 bp, synthetic construct
  misc_feature 1..25: note = Oligonucleotide
  source 1..25: mol_type = other DNA
caaaaaagtgacaaggatctcctat

SEQ ID NO: 29534 - DNA, 25 bp, synthetic construct
  misc_feature 1..25: note = Oligonucleotide
  source 1..25: mol_type = other DNA
tatcaaaaaagtgacaaggatctcc

SEQ ID NO: 29535 - DNA, 25 bp, synthetic construct
  misc_feature 1..25: note = Oligonucleotide
  source 1..25: mol_type = other DNA
cattatcaaaaaagtgacaaggatc

SEQ ID NO: 29536 - DNA, 25 bp, synthetic construct
  misc_feature 1..25: note = Oligonucleotide
  source 1..25: mol_type = other DNA
ggacattatcaaaaaagtgacaagg

SEQ ID NO: 29537 - DNA, 25 bp, synthetic construct
  misc_feature 1..25: note = Oligonucleotide
  source 1..25: mol_type = other DNA
aaaggacattatcaaaaaagtgaca

SEQ ID NO: 29538 - DNA, 25 bp, synthetic construct
  misc_feature 1..25: note = Oligonucleotide
  source 1..25: mol_type = other DNA
atcaaaggacattatcaaaaaagtg

SEQ ID NO: 29539 - DNA, 25 bp, synthetic construct
  misc_feature 1..25: note = Oligonucleotide
  source 1..25: mol_type = other DNA
tacatcaaaggacattatcaaaaaa

SEQ ID NO: 29540 - DNA, 25 bp, synthetic construct
  misc_feature 1..25: note = Oligonucleotide
  source 1..25: mol_type = other DNA
ttgtacatcaaaggacattatcaaa

SEQ ID NO: 29541 - DNA, 25 bp, synthetic construct
  misc_feature 1..25: note = Oligonucleotide
  source 1..25: mol_type = other DNA
ttcttgtacatcaaaggacattatc

SEQ ID NO: 29542 - DNA, 25 bp, synthetic construct
  misc_feature 1..25: note = Oligonucleotide
  source 1..25: mol_type = other DNA
aaattcttgtacatcaaaggacatt

SEQ ID NO: 29543 - DNA, 25 bp, synthetic construct
  misc_feature 1..25: note = Oligonucleotide
  source 1..25: mol_type = other DNA
taaaaattcttgtacatcaaaggac

SEQ ID NO: 29544 - DNA, 25 bp, synthetic construct
  misc_feature 1..25: note = Oligonucleotide
  source 1..25: mol_type = other DNA
aattaaaaattcttgtacatcaaag

SEQ ID NO: 29545 - DNA, 25 bp, synthetic construct
  misc_feature 1..25: note = Oligonucleotide
  source 1..25: mol_type = other DNA
caaaattaaaaattcttgtacatca

SEQ ID NO: 29546 - DNA, 25 bp, synthetic construct
  misc_feature 1..25: note = Oligonucleotide
  source 1..25: mol_type = other DNA
tatcaaaattaaaaattcttgtaca

SEQ ID NO: 29547 - DNA, 25 bp, synthetic construct
  misc_feature 1..25: note = Oligonucleotide
  source 1..25: mol_type = other DNA
ctttatcaaaattaaaaattcttgt

SEQ ID NO: 29548 - DNA, 25 bp, synthetic construct
  misc_feature 1..25: note = Oligonucleotide
  source 1..25: mol_type = other DNA
gaactttatcaaaattaaaaattct

SEQ ID NO: 29549 - DNA, 25 bp, synthetic construct
  misc_feature 1..25: note = Oligonucleotide
  source 1..25: mol_type = other DNA
cttgaactttatcaaaattaaaaat

SEQ ID NO: 29550 - DNA, 25 bp, synthetic construct
  misc_feature 1..25: note = Oligonucleotide
  source 1..25: mol_type = other DNA
taccttgaactttatcaaaattaaa

SEQ ID NO: 29551 - DNA, 25 bp, synthetic construct
  misc_feature 1..25: note = Oligonucleotide
  source 1..25: mol_type = other DNA
agataccttgaactttatcaaaatt

SEQ ID NO: 29552 - DNA, 25 bp, synthetic construct
  misc_feature 1..25: note = Oligonucleotide
  source 1..25: mol_type = other DNA
aatagataccttgaactttatcaaa

SEQ ID NO: 29553 - DNA, 25 bp, synthetic construct
  misc_feature 1..25: note = Oligonucleotide
  source 1..25: mol_type = other DNA
aaaaatagataccttgaactttatc

SEQ ID NO: 29554 - DNA, 25 bp, synthetic construct
  misc_feature 1..25: note = Oligonucleotide
  source 1..25: mol_type = other DNA
gaaaaaaatagataccttgaacttt

SEQ ID NO: 29555 - DNA, 25 bp, synthetic construct
  misc_feature 1..25: note = Oligonucleotide
  source 1..25: mol_type = other DNA
aaagaaaaaaatagataccttgaac

SEQ ID NO: 29556 - DNA, 25 bp, synthetic construct
  misc_feature 1..25: note = Oligonucleotide
  source 1..25: mol_type = other DNA
acaaaagaaaaaaatagataccttg

SEQ ID NO: 29557 - DNA, 25 bp, synthetic construct
  misc_feature 1..25: note = Oligonucleotide
  source 1..25: mol_type = other DNA
acaacaaaagaaaaaaatagatacc

SEQ ID NO: 29558 - DNA, 25 bp, synthetic construct
  misc_feature 1..25: note = Oligonucleotide
  source 1..25: mol_type = other DNA
tgaacaacaaaagaaaaaaatagat

SEQ ID NO: 29559 - DNA, 25 bp, synthetic construct
  misc_feature 1..25: note = Oligonucleotide
  source 1..25: mol_type = other DNA
gcatgaacaacaaaagaaaaaaata

SEQ ID NO: 29560 - DNA, 25 bp, synthetic construct
  misc_feature 1..25: note = Oligonucleotide
  source 1..25: mol_type = other DNA
aaagcatgaacaacaaaagaaaaaa

SEQ ID NO: 29561 - DNA, 25 bp, synthetic construct
  misc_feature 1..25: note = Oligonucleotide
  source 1..25: mol_type = other DNA
ccaaaagcatgaacaacaaaagaaa

SEQ ID NO: 29562 - DNA, 25 bp, synthetic construct
  misc_feature 1..25: note = Oligonucleotide
  source 1..25: mol_type = other DNA
acaccaaaagcatgaacaacaaaag

SEQ ID NO: 29563 - DNA, 25 bp, synthetic construct
  misc_feature 1..25: note = Oligonucleotide
  source 1..25: mol_type = other DNA
atgacaccaaaagcatgaacaacaa

SEQ ID NO: 29564 - DNA, 25 bp, synthetic construct
  misc_feature 1..25: note = Oligonucleotide
  source 1..25: mol_type = other DNA
cctatgacaccaaaagcatgaacaa

SEQ ID NO: 29565 - DNA, 25 bp, synthetic construct
  misc_feature 1..25: note = Oligonucleotide
  source 1..25: mol_type = other DNA
tgacctatgacaccaaaagcatgaa

SEQ ID NO: 29566 - DNA, 25 bp, synthetic construct
  misc_feature 1..25: note = Oligonucleotide
  source 1..25: mol_type = other DNA
tcgtgacctatgacaccaaaagcat

SEQ ID NO: 29567 - DNA, 25 bp, synthetic construct
  misc_feature 1..25: note = Oligonucleotide
  source 1..25: mol_type = other DNA
ccctcgtgacctatgacaccaaaag

SEQ ID NO: 29568 - DNA, 25 bp, synthetic construct
  misc_feature 1..25: note = Oligonucleotide
  source 1..25: mol_type = other DNA
aaaccctcgtgacctatgacaccaa

SEQ ID NO: 29569 - DNA, 25 bp, synthetic construct
  misc_feature 1..25: note = Oligonucleotide
  source 1..25: mol_type = other DNA
gataaaccctcgtgacctatgacac

SEQ ID NO: 29570 - DNA, 25 bp, synthetic construct
  misc_feature 1..25: note = Oligonucleotide
  source 1..25: mol_type = other DNA
gaggataaaccctcgtgacctatga

SEQ ID NO: 29571 - DNA, 25 bp, synthetic construct
  misc_feature 1..25: note = Oligonucleotide
  source 1..25: mol_type = other DNA
ctagaggataaaccctcgtgaccta

SEQ ID NO: 29572 - DNA, 25 bp, synthetic construct
  misc_feature 1..25: note = Oligonucleotide
  source 1..25: mol_type = other DNA
aacctagaggataaaccctcgtgac

SEQ ID NO: 29573 - DNA, 25 bp, synthetic construct
  misc_feature 1..25: note = Oligonucleotide
  source 1..25: mol_type = other DNA
gaaaacctagaggataaaccctcgt

SEQ ID NO: 29574 - DNA, 25 bp, synthetic construct
  misc_feature 1..25: note = Oligonucleotide
  source 1..25: mol_type = other DNA
gaagaaaacctagaggataaaccct

SEQ ID NO: 29575 - DNA, 25 bp, synthetic construct
  misc_feature 1..25: note = Oligonucleotide
  source 1..25: mol_type = other DNA
ttagaagaaaacctagaggataaac

SEQ ID NO: 29576 - DNA, 25 bp, synthetic construct
  misc_feature 1..25: note = Oligonucleotide
  source 1..25: mol_type = other DNA
ttcttagaagaaaacctagaggata

SEQ ID NO: 29577 - DNA, 25 bp, synthetic construct
  misc_feature 1..25: note = Oligonucleotide
  source 1..25: mol_type = other DNA
aaattcttagaagaaaacctagagg

SEQ ID NO: 29578 - DNA, 25 bp, synthetic construct
  misc_feature 1..25: note = Oligonucleotide
  source 1..25: mol_type = other DNA
gtaaaattcttagaagaaaacctag

SEQ ID NO: 29579 - DNA, 25 bp, synthetic construct
  misc_feature 1..25: note = Oligonucleotide
  source 1..25: mol_type = other DNA
accgtaaaattcttagaagaaaacc

SEQ ID NO: 29580 - DNA, 25 bp, synthetic construct
  misc_feature 1..25: note = Oligonucleotide
  source 1..25: mol_type = other DNA
aaaaccgtaaaattcttagaagaaa

SEQ ID NO: 29581 - DNA, 25 bp, synthetic construct
  misc_feature 1..25: note = Oligonucleotide
  source 1..25: mol_type = other DNA
gtgaaaaccgtaaaattcttagaag

SEQ ID NO: 29582 - DNA, 25 bp, synthetic construct
  misc_feature 1..25: note = Oligonucleotide
  source 1..25: mol_type = other DNA
agagtgaaaaccgtaaaattcttag

SEQ ID NO: 29583 - DNA, 25 bp, synthetic construct
  misc_feature 1..25: note = Oligonucleotide
  source 1..25: mol_type = other DNA
ctaagagtgaaaaccgtaaaattct

SEQ ID NO: 29584 - DNA, 25 bp, synthetic construct
  misc_feature 1..25: note = Oligonucleotide
  source 1..25: mol_type = other DNA
gacctaagagtgaaaaccgtaaaat

SEQ ID NO: 29585 - DNA, 25 bp, synthetic construct
  misc_feature 1..25: note = Oligonucleotide
  source 1..25: mol_type = other DNA
agtgacctaagagtgaaaaccgtaa

SEQ ID NO: 29586 - DNA, 25 bp, synthetic construct
  misc_feature 1..25: note = Oligonucleotide
  source 1..25: mol_type = other DNA
atcagtgacctaagagtgaaaaccg

SEQ ID NO: 29587 - DNA, 25 bp, synthetic construct
  misc_feature 1..25: note = Oligonucleotide
  source 1..25: mol_type = other DNA
tggatcagtgacctaagagtgaaaa

SEQ ID NO: 29588 - DNA, 25 bp, synthetic construct
  misc_feature 1..25: note = Oligonucleotide
  source 1..25: mol_type = other DNA
aaatggatcagtgacctaagagtga

SEQ ID NO: 29589 - DNA, 25 bp, synthetic construct
  misc_feature 1..25: note = Oligonucleotide
  source 1..25: mol_type = other DNA
ttaaaatggatcagtgacctaagag

SEQ ID NO: 29590 - DNA, 25 bp, synthetic construct
  misc_feature 1..25: note = Oligonucleotide
  source 1..25: mol_type = other DNA
aacttaaaatggatcagtgacctaa

SEQ ID NO: 29591 - DNA, 25 bp, synthetic construct
  misc_feature 1..25: note = Oligonucleotide
  source 1..25: mol_type = other DNA
taaaacttaaaatggatcagtgacc

SEQ ID NO: 29592 - DNA, 25 bp, synthetic construct
  misc_feature 1..25: note = Oligonucleotide
  source 1..25: mol_type = other DNA
agttaaaacttaaaatggatcagtg

SEQ ID NO: 29593 - DNA, 25 bp, synthetic construct
  misc_feature 1..25: note = Oligonucleotide
  source 1..25: mol_type = other DNA
agaagttaaaacttaaaatggatca

SEQ ID NO: 29594 - DNA, 25 bp, synthetic construct
  misc_feature 1..25: note = Oligonucleotide
  source 1..25: mol_type = other DNA
aacagaagttaaaacttaaaatgga

SEQ ID NO: 29595 - DNA, 25 bp, synthetic construct
  misc_feature 1..25: note = Oligonucleotide
  source 1..25: mol_type = other DNA
ataaacagaagttaaaacttaaaat

SEQ ID NO: 29596 - DNA, 25 bp, synthetic construct
  misc_feature 1..25: note = Oligonucleotide
  source 1..25: mol_type = other DNA
accataaacagaagttaaaacttaa

SEQ ID NO: 29597 - DNA, 25 bp, synthetic construct
  misc_feature 1..25: note = Oligonucleotide
  source 1..25: mol_type = other DNA
cacaccataaacagaagttaaaact

SEQ ID NO: 29598 - DNA, 25 bp, synthetic construct
  misc_feature 1..25: note = Oligonucleotide
  source 1..25: mol_type = other DNA
cctcacaccataaacagaagttaaa

SEQ ID NO: 29599 - DNA, 25 bp, synthetic construct
  misc_feature 1..25: note = Oligonucleotide
  source 1..25: mol_type = other DNA
ctacctcacaccataaacagaagtt

SEQ ID NO: 29600 - DNA, 25 bp, synthetic construct
  misc_feature 1..25: note = Oligonucleotide
  source 1..25: mol_type = other DNA
tccctacctcacaccataaacagaa

SEQ ID NO: 29601 - DNA, 25 bp, synthetic construct
  misc_feature 1..25: note = Oligonucleotide
  source 1..25: mol_type = other DNA
ggctccctacctcacaccataaaca

SEQ ID NO: 29602 - DNA, 25 bp, synthetic construct
  misc_feature 1..25: note = Oligonucleotide
  source 1..25: mol_type = other DNA
gatggctccctacctcacaccataa

SEQ ID NO: 29603 - DNA, 25 bp, synthetic construct
  misc_feature 1..25: note = Oligonucleotide
  source 1..25: mol_type = other DNA
gaagatggctccctacctcacacca

SEQ ID NO: 29604 - DNA, 25 bp, synthetic construct
  misc_feature 1..25: note = Oligonucleotide
  source 1..25: mol_type = other DNA
aatgaagatggctccctacctcaca

SEQ ID NO: 29605 - DNA, 25 bp, synthetic construct
  misc_feature 1..25: note = Oligonucleotide
  source 1..25: mol_type = other DNA
aataatgaagatggctccctacctc

SEQ ID NO: 29606 - DNA, 25 bp, synthetic construct
  misc_feature 1..25: note = Oligonucleotide
  source 1..25: mol_type = other DNA
caaaataatgaagatggctccctac

SEQ ID NO: 29607 - DNA, 25 bp, synthetic construct
  misc_feature 1..25: note = Oligonucleotide
  source 1..25: mol_type = other DNA
atgcaaaataatgaagatggctccc

SEQ ID NO: 29608 - DNA, 25 bp, synthetic construct
  misc_feature 1..25: note = Oligonucleotide
  source 1..25: mol_type = other DNA
catatgcaaaataatgaagatggct

SEQ ID NO: 29609 - DNA, 25 bp, synthetic construct
  misc_feature 1..25: note = Oligonucleotide
  source 1..25: mol_type = other DNA
attcatatgcaaaataatgaagatg

SEQ ID NO: 29610 - DNA, 25 bp, synthetic construct
  misc_feature 1..25: note = Oligonucleotide
  source 1..25: mol_type = other DNA
gatattcatatgcaaaataatgaag

SEQ ID NO: 29611 - DNA, 25 bp, synthetic construct
  misc_feature 1..25: note = Oligonucleotide
  source 1..25: mol_type = other DNA
ttggatattcatatgcaaaataatg

SEQ ID NO: 29612 - DNA, 25 bp, synthetic construct
  misc_feature 1..25: note = Oligonucleotide
  source 1..25: mol_type = other DNA
caattggatattcatatgcaaaata

SEQ ID NO: 29613 - DNA, 25 bp, synthetic construct
  misc_feature 1..25: note = Oligonucleotide
  source 1..25: mol_type = other DNA
ggacaattggatattcatatgcaaa

SEQ ID NO: 29614 - DNA, 25 bp, synthetic construct
  misc_feature 1..25: note = Oligonucleotide
  source 1..25: mol_type = other DNA
gctggacaattggatattcatatgc

SEQ ID NO: 29615 - DNA, 25 bp, synthetic construct
  misc_feature 1..25: note = Oligonucleotide
  source 1..25: mol_type = other DNA
ggtgctggacaattggatattcata

SEQ ID NO: 29616 - DNA, 25 bp, synthetic construct
  misc_feature 1..25: note = Oligonucleotide
  source 1..25: mol_type = other DNA
aatggtgctggacaattggatattc

SEQ ID NO: 29617 - DNA, 25 bp, synthetic construct
  misc_feature 1..25: note = Oligonucleotide
  source 1..25: mol_type = other DNA
acaaatggtgctggacaattggata

SEQ ID NO: 29618 - DNA, 25 bp, synthetic construct
  misc_feature 1..25: note = Oligonucleotide
  source 1..25: mol_type = other DNA
tcaacaaatggtgctggacaattgg

SEQ ID NO: 29619 - DNA, 25 bp, synthetic construct
  misc_feature 1..25: note = Oligonucleotide
  source 1..25: mol_type = other DNA
tcttcaacaaatggtgctggacaat

SEQ ID NO: 29620 - DNA, 25 bp, synthetic construct
  misc_feature 1..25: note = Oligonucleotide
  source 1..25: mol_type = other DNA
gtctcttcaacaaatggtgctggac

SEQ ID NO: 29621 - DNA, 25 bp, synthetic construct
  misc_feature 1..25: note = Oligonucleotide
  source 1..25: mol_type = other DNA
atagtctcttcaacaaatggtgctg

SEQ ID NO: 29622 - DNA, 25 bp, synthetic construct
  misc_feature 1..25: note = Oligonucleotide
  source 1..25: mol_type = other DNA
agaatagtctcttcaacaaatggtg

SEQ ID NO: 29623 - DNA, 25 bp, synthetic construct
  misc_feature 1..25: note = Oligonucleotide
  source 1..25: mol_type = other DNA
aaaagaatagtctcttcaacaaatg

SEQ ID NO: 29624 - DNA, 25 bp, synthetic construct
  misc_feature 1..25: note = Oligonucleotide
  source 1..25: mol_type = other DNA
gggaaaagaatagtctcttcaacaa

SEQ ID NO: 29625 - DNA, 25 bp, synthetic construct
  misc_feature 1..25: note = Oligonucleotide
  source 1..25: mol_type = other DNA
aatgggaaaagaatagtctcttcaa

SEQ ID NO: 29626 - DNA, 25 bp, synthetic construct
  misc_feature 1..25: note = Oligonucleotide
  source 1..25: mol_type = other DNA
ttcaatgggaaaagaatagtctctt

SEQ ID NO: 29627 - DNA, 25 bp, synthetic construct
  misc_feature 1..25: note = Oligonucleotide
  source 1..25: mol_type = other DNA
ccattcaatgggaaaagaatagtct

SEQ ID NO: 29628 - DNA, 25 bp, synthetic construct
  misc_feature 1..25: note = Oligonucleotide
  source 1..25: mol_type = other DNA
agaccattcaatgggaaaagaatag

SEQ ID NO: 29629 - DNA, 25 bp, synthetic construct
  misc_feature 1..25: note = Oligonucleotide
  source 1..25: mol_type = other DNA
ccaagaccattcaatgggaaaagaa

SEQ ID NO: 29630 - DNA, 25 bp, synthetic construct
  misc_feature 1..25: note = Oligonucleotide
  source 1..25: mol_type = other DNA
gtgccaagaccattcaatgggaaaa

SEQ ID NO: 29631 - DNA, 25 bp, synthetic construct
  misc_feature 1..25: note = Oligonucleotide
  source 1..25: mol_type = other DNA
agggtgccaagaccattcaatggga

SEQ ID NO: 29632 - DNA, 25 bp, synthetic construct
  misc_feature 1..25: note = Oligonucleotide
  source 1..25: mol_type = other DNA
acaagggtgccaagaccattcaatg

SEQ ID NO: 29633 - DNA, 25 bp, synthetic construct
  misc_feature 1..25: note = Oligonucleotide
  source 1..25: mol_type = other DNA
tcaacaagggtgccaagaccattca

SEQ ID NO: 29634 - DNA, 25 bp, synthetic construct
  misc_feature 1..25: note = Oligonucleotide
  source 1..25: mol_type = other DNA
ttttcaacaagggtgccaagaccat

SEQ ID NO: 29635 - DNA, 25 bp, synthetic construct
  misc_feature 1..25: note = Oligonucleotide
  source 1..25: mol_type = other DNA
tcattttcaacaagggtgccaagac

SEQ ID NO: 29636 - DNA, 25 bp, synthetic construct
  misc_feature 1..25: note = Oligonucleotide
  source 1..25: mol_type = other DNA
aattcattttcaacaagggtgccaa

SEQ ID NO: 29637 - DNA, 25 bp, synthetic construct
  misc_feature 1..25: note = Oligonucleotide
  source 1..25: mol_type = other DNA
atcaattcattttcaacaagggtgc

SEQ ID NO: 29638 - DNA, 25 bp, synthetic construct
  misc_feature 1..25: note = Oligonucleotide
  source 1..25: mol_type = other DNA
aggatcaattcattttcaacaaggg

SEQ ID NO: 29639 - DNA, 25 bp, synthetic construct
  misc_feature 1..25: note = Oligonucleotide
  source 1..25: mol_type = other DNA
tctaggatcaattcattttcaacaa

SEQ ID NO: 29640 - DNA, 25 bp, synthetic construct
  misc_feature 1..25: note = Oligonucleotide
  source 1..25: mol_type = other DNA
atatctaggatcaattcattttcaa

SEQ ID NO: 29641 - DNA, 25 bp, synthetic construct
  misc_feature 1..25: note = Oligonucleotide
  source 1..25: mol_type = other DNA
cacatatctaggatcaattcatttt

SEQ ID NO: 29642 - DNA, 25 bp, synthetic construct
  misc_feature 1..25: note = Oligonucleotide
  source 1..25: mol_type = other DNA
acccacatatctaggatcaattcat

SEQ ID NO: 29643 - DNA, 25 bp, synthetic construct
  misc_feature 1..25: note = Oligonucleotide
  source 1..25: mol_type = other DNA
taaacccacatatctaggatcaatt

SEQ ID NO: 29644 - DNA, 25 bp, synthetic construct
  misc_feature 1..25: note = Oligonucleotide
  source 1..25: mol_type = other DNA
aaataaacccacatatctaggatca

SEQ ID NO: 29645 - DNA, 25 bp, synthetic construct
  misc_feature 1..25: note = Oligonucleotide
  source 1..25: mol_type = other DNA
tccaaataaacccacatatctagga

SEQ ID NO: 29646 - DNA, 25 bp, synthetic construct
  misc_feature 1..25: note = Oligonucleotide
  source 1..25: mol_type = other DNA
gagtccaaataaacccacatatcta

SEQ ID NO: 29647 - DNA, 25 bp, synthetic construct
  misc_feature 1..25: note = Oligonucleotide
  source 1..25: mol_type = other DNA
tgagagtccaaataaacccacatat

SEQ ID NO: 29648 - DNA, 25 bp, synthetic construct
  misc_feature 1..25: note = Oligonucleotide
  source 1..25: mol_type = other DNA
aattgagagtccaaataaacccaca

SEQ ID NO: 29649 - DNA, 25 bp, synthetic construct
  misc_feature 1..25: note = Oligonucleotide
  source 1..25: mol_type = other DNA
tagaattgagagtccaaataaaccc

SEQ ID NO: 29650 - DNA, 25 bp, synthetic construct
  misc_feature 1..25: note = Oligonucleotide
  source 1..25: mol_type = other DNA
ggatagaattgagagtccaaataaa

SEQ ID NO: 29651 - DNA, 25 bp, synthetic construct
  misc_feature 1..25: note = Oligonucleotide
  source 1..25: mol_type = other DNA
ctgggatagaattgagagtccaaat

SEQ ID NO: 29652 - DNA, 25 bp, synthetic construct
  misc_feature 1..25: note = Oligonucleotide
  source 1..25: mol_type = other DNA
ccactgggatagaattgagagtcca

SEQ ID NO: 29653 - DNA, 25 bp, synthetic construct
  misc_feature 1..25: note = Oligonucleotide
  source 1..25: mol_type = other DNA
agaccactgggatagaattgagagt

SEQ ID NO: 29654 - DNA, 25 bp, synthetic construct
  misc_feature 1..25: note = Oligonucleotide
  source 1..25: mol_type = other DNA
tgtagaccactgggatagaattgag

SEQ ID NO: 29655 - DNA, 25 bp, synthetic construct
  misc_feature 1..25: note = Oligonucleotide
  source 1..25: mol_type = other DNA
acatgtagaccactgggatagaatt

SEQ ID NO: 29656 - DNA, 25 bp, synthetic construct
  misc_feature 1..25: note = Oligonucleotide
  source 1..25: mol_type = other DNA
tatacatgtagaccactgggataga

SEQ ID NO: 29657 - DNA, 25 bp, synthetic construct
  misc_feature 1..25: note = Oligonucleotide
  source 1..25: mol_type = other DNA
gaatatacatgtagaccactgggat

SEQ ID NO: 29658 - DNA, 25 bp, synthetic construct
  misc_feature 1..25: note = Oligonucleotide
  source 1..25: mol_type = other DNA
taagaatatacatgtagaccactgg

SEQ ID NO: 29659 - DNA, 25 bp, synthetic construct
  misc_feature 1..25: note = Oligonucleotide
  source 1..25: mol_type = other DNA
gcataagaatatacatgtagaccac

SEQ ID NO: 29660 - DNA, 25 bp, synthetic construct
  misc_feature 1..25: note = Oligonucleotide
  source 1..25: mol_type = other DNA
ctggcataagaatatacatgtagac

SEQ ID NO: 29661 - DNA, 25 bp, synthetic construct
  misc_feature 1..25: note = Oligonucleotide
  source 1..25: mol_type = other DNA
gtcctggcataagaatatacatgta

SEQ ID NO: 29662 - DNA, 25 bp, synthetic construct
  misc_feature 1..25: note = Oligonucleotide
  source 1..25: mol_type = other DNA
gtggtcctggcataagaatatacat

SEQ ID NO: 29663 - DNA, 25 bp, synthetic construct
  misc_feature 1..25: note = Oligonucleotide
  source 1..25: mol_type = other DNA
catgtggtcctggcataagaatata

SEQ ID NO: 29664 - DNA, 25 bp, synthetic construct
  misc_feature 1..25: note = Oligonucleotide
  source 1..25: mol_type = other DNA
aaccatgtggtcctggcataagaat

SEQ ID NO: 29665 - DNA, 25 bp, synthetic construct
  misc_feature 1..25: note = Oligonucleotide
  source 1..25: mol_type = other DNA
tcaaaccatgtggtcctggcataag

SEQ ID NO: 29666 - DNA, 25 bp, synthetic construct
  misc_feature 1..25: note = Oligonucleotide
  source 1..25: mol_type = other DNA
taatcaaaccatgtggtcctggcat

SEQ ID NO: 29667 - DNA, 25 bp, synthetic construct
  misc_feature 1..25: note = Oligonucleotide
  source 1..25: mol_type = other DNA
cagtaatcaaaccatgtggtcctgg

SEQ ID NO: 29668 - DNA, 25 bp, synthetic construct
  misc_feature 1..25: note = Oligonucleotide
  source 1..25: mol_type = other DNA
ctgcagtaatcaaaccatgtggtcc

SEQ ID NO: 29669 - DNA, 25 bp, synthetic construct
  misc_feature 1..25: note = Oligonucleotide
  source 1..25: mol_type = other DNA
aagctgcagtaatcaaaccatgtgg

SEQ ID NO: 29670 - DNA, 25 bp, synthetic construct
  misc_feature 1..25: note = Oligonucleotide
  source 1..25: mol_type = other DNA
acaaagctgcagtaatcaaaccatg

SEQ ID NO: 29671 - DNA, 25 bp, synthetic construct
  misc_feature 1..25: note = Oligonucleotide
  source 1..25: mol_type = other DNA
actacaaagctgcagtaatcaaacc

SEQ ID NO: 29672 - DNA, 25 bp, synthetic construct
  misc_feature 1..25: note = Oligonucleotide
  source 1..25: mol_type = other DNA
gttactacaaagctgcagtaatcaa

SEQ ID NO: 29673 - DNA, 25 bp, synthetic construct
  misc_feature 1..25: note = Oligonucleotide
  source 1..25: mol_type = other DNA
aaagttactacaaagctgcagtaat

SEQ ID NO: 29674 - DNA, 25 bp, synthetic construct
  misc_feature 1..25: note = Oligonucleotide
  source 1..25: mol_type = other DNA
taaaaagttactacaaagctgcagt

SEQ ID NO: 29675 - DNA, 25 bp, synthetic construct
  misc_feature 1..25: note = Oligonucleotide
  source 1..25: mol_type = other DNA
aaataaaaagttactacaaagctgc

SEQ ID NO: 29676 - DNA, 25 bp, synthetic construct
  misc_feature 1..25: note = Oligonucleotide
  source 1..25: mol_type = other DNA
taaaaataaaaagttactacaaagc

SEQ ID NO: 29677 - DNA, 25 bp, synthetic construct
  misc_feature 1..25: note = Oligonucleotide
  source 1..25: mol_type = other DNA
aaataaaaataaaaagttactacaa

SEQ ID NO: 29678 - DNA, 25 bp, synthetic construct
  misc_feature 1..25: note = Oligonucleotide
  source 1..25: mol_type = other DNA
aaaaaataaaaataaaaagttacta

SEQ ID NO: 29679 - DNA, 25 bp, synthetic construct
  misc_feature 1..25: note = Oligonucleotide
  source 1..25: mol_type = other DNA
ccaaaaaaataaaaataaaaagtta

SEQ ID NO: 29680 - DNA, 25 bp, synthetic construct
  misc_feature 1..25: note = Oligonucleotide
  source 1..25: mol_type = other DNA
tctccaaaaaaataaaaataaaaag

SEQ ID NO: 29681 - DNA, 25 bp, synthetic construct
  misc_feature 1..25: note = Oligonucleotide
  source 1..25: mol_type = other DNA
ccatctccaaaaaaataaaaataaa

SEQ ID NO: 29682 - DNA, 25 bp, synthetic construct
  misc_feature 1..25: note = Oligonucleotide
  source 1..25: mol_type = other DNA
actccatctccaaaaaaataaaaat

SEQ ID NO: 29683 - DNA, 25 bp, synthetic construct
  misc_feature 1..25: note = Oligonucleotide
  source 1..25: mol_type = other DNA
aaaactccatctccaaaaaaataaa

SEQ ID NO: 29684 - DNA, 25 bp, synthetic construct
  misc_feature 1..25: note = Oligonucleotide
  source 1..25: mol_type = other DNA
agcaaaactccatctccaaaaaaat

SEQ ID NO: 29685 - DNA, 25 bp, synthetic construct
  misc_feature 1..25: note = Oligonucleotide
  source 1..25: mol_type = other DNA
aagagcaaaactccatctccaaaaa

SEQ ID NO: 29686 - DNA, 25 bp, synthetic construct
  misc_feature 1..25: note = Oligonucleotide
  source 1..25: mol_type = other DNA
gacaagagcaaaactccatctccaa

SEQ ID NO: 29687 - DNA, 25 bp, synthetic construct
  misc_feature 1..25: note = Oligonucleotide
  source 1..25: mol_type = other DNA
ggtgacaagagcaaaactccatctc

SEQ ID NO: 29688 - DNA, 25 bp, synthetic construct
  misc_feature 1..25: note = Oligonucleotide
  source 1..25: mol_type = other DNA
ctgggtgacaagagcaaaactccat

SEQ ID NO: 29689 - DNA, 25 bp, synthetic construct
  misc_feature 1..25: note = Oligonucleotide
  source 1..25: mol_type = other DNA
agcctgggtgacaagagcaaaactc

SEQ ID NO: 29690 - DNA, 25 bp, synthetic construct
  misc_feature 1..25: note = Oligonucleotide
  source 1..25: mol_type = other DNA
tccagcctgggtgacaagagcaaaa

SEQ ID NO: 29691 - DNA, 25 bp, synthetic construct
  misc_feature 1..25: note = Oligonucleotide
  source 1..25: mol_type = other DNA
cactccagcctgggtgacaagagca

SEQ ID NO: 29692 - DNA, 25 bp, synthetic construct
  misc_feature 1..25: note = Oligonucleotide
  source 1..25: mol_type = other DNA
ttgcactccagcctgggtgacaaga

SEQ ID NO: 29693 - DNA, 25 bp, synthetic construct
  misc_feature 1..25: note = Oligonucleotide
  source 1..25: mol_type = other DNA
ccattgcactccagcctgggtgaca

SEQ ID NO: 29694 - DNA, 25 bp, synthetic construct
  misc_feature 1..25: note = Oligonucleotide
  source 1..25: mol_type = other DNA
gcgccattgcactccagcctgggtg

SEQ ID NO: 29695 - DNA, 25 bp, synthetic construct
  misc_feature 1..25: note = Oligonucleotide
  source 1..25: mol_type = other DNA
actgcgccattgcactccagcctgg

SEQ ID NO: 29696 - DNA, 25 bp, synthetic construct
  misc_feature 1..25: note = Oligonucleotide
  source 1..25: mol_type = other DNA
gagactgcgccattgcactccagcc

SEQ ID NO: 29697 - DNA, 25 bp, synthetic construct
  misc_feature 1..25: note = Oligonucleotide
  source 1..25: mol_type = other DNA
gctgagactgcgccattgcactcca

SEQ ID NO: 29698 - DNA, 25 bp, synthetic construct
  misc_feature 1..25: note = Oligonucleotide
  source 1..25: mol_type = other DNA
tgagctgagactgcgccattgcact

SEQ ID NO: 29699 - DNA, 25 bp, synthetic construct
  misc_feature 1..25: note = Oligonucleotide
  source 1..25: mol_type = other DNA
cagtgagctgagactgcgccattgc

SEQ ID NO: 29700 - DNA, 25 bp, synthetic construct
  misc_feature 1..25: note = Oligonucleotide
  source 1..25: mol_type = other DNA
ttgcagtgagctgagactgcgccat

SEQ ID NO: 29701 - DNA, 25 bp, synthetic construct
  misc_feature 1..25: note = Oligonucleotide
  source 1..25: mol_type = other DNA
aggttgcagtgagctgagactgcgc

SEQ ID NO: 29702 - DNA, 25 bp, synthetic construct
  misc_feature 1..25: note = Oligonucleotide
  source 1..25: mol_type = other DNA
cggaggttgcagtgagctgagactg

SEQ ID NO: 29703 - DNA, 25 bp, synthetic construct
  misc_feature 1..25: note = Oligonucleotide
  source 1..25: mol_type = other DNA
aggcggaggttgcagtgagctgaga

SEQ ID NO: 29704 - DNA, 25 bp, synthetic construct
  misc_feature 1..25: note = Oligonucleotide
  source 1..25: mol_type = other DNA
gggaggcggaggttgcagtgagctg

SEQ ID NO: 29705 - DNA, 25 bp, synthetic construct
  misc_feature 1..25: note = Oligonucleotide
  source 1..25: mol_type = other DNA
cctgggaggcggaggttgcagtgag

SEQ ID NO: 29706 - DNA, 25 bp, synthetic construct
  misc_feature 1..25: note = Oligonucleotide
  source 1..25: mol_type = other DNA
gaacctgggaggcggaggttgcagt

SEQ ID NO: 29707 - DNA, 25 bp, synthetic construct
  misc_feature 1..25: note = Oligonucleotide
  source 1..25: mol_type = other DNA
cttgaacctgggaggcggaggttgc

SEQ ID NO: 29708 - DNA, 25 bp, synthetic construct
  misc_feature 1..25: note = Oligonucleotide
  source 1..25: mol_type = other DNA
ttgcttgaacctgggaggcggaggt

SEQ ID NO: 29709 - DNA, 25 bp, synthetic construct
  misc_feature 1..25: note = Oligonucleotide
  source 1..25: mol_type = other DNA
gaattgcttgaacctgggaggcgga

SEQ ID NO: 29710 - DNA, 25 bp, synthetic construct
  misc_feature 1..25: note = Oligonucleotide
  source 1..25: mol_type = other DNA
ggagaattgcttgaacctgggaggc

SEQ ID NO: 29711 - DNA, 25 bp, synthetic construct
  misc_feature 1..25: note = Oligonucleotide
  source 1..25: mol_type = other DNA
gcaggagaattgcttgaacctggga

SEQ ID NO: 29712 - DNA, 25 bp, synthetic construct
  misc_feature 1..25: note = Oligonucleotide
  source 1..25: mol_type = other DNA
gaggcaggagaattgcttgaacctg

SEQ ID NO: 29713 - DNA, 25 bp, synthetic construct
  misc_feature 1..25: note = Oligonucleotide
  source 1..25: mol_type = other DNA
gctgaggcaggagaattgcttgaac

SEQ ID NO: 29714 - DNA, 25 bp, synthetic construct
  misc_feature 1..25: note = Oligonucleotide
  source 1..25: mol_type = other DNA
gaggctgaggcaggagaattgcttg

SEQ ID NO: 29715 - DNA, 25 bp, synthetic construct
  misc_feature 1..25: note = Oligonucleotide
  source 1..25: mol_type = other DNA
ttggaggctgaggcaggagaattgc

SEQ ID NO: 29716 - DNA, 25 bp, synthetic construct
  misc_feature 1..25: note = Oligonucleotide
  source 1..25: mol_type = other DNA
actttggaggctgaggcaggagaat

SEQ ID NO: 29717 - DNA, 25 bp, synthetic construct
  misc_feature 1..25: note = Oligonucleotide
  source 1..25: mol_type = other DNA
gctactttggaggctgaggcaggag

SEQ ID NO: 29718 - DNA, 25 bp, synthetic construct
  misc_feature 1..25: note = Oligonucleotide
  source 1..25: mol_type = other DNA
ccagctactttggaggctgaggcag

SEQ ID NO: 29719 - DNA, 25 bp, synthetic construct
  misc_feature 1..25: note = Oligonucleotide
  source 1..25: mol_type = other DNA
atcccagctactttggaggctgagg

SEQ ID NO: 29720 - DNA, 25 bp, synthetic construct
  misc_feature 1..25: note = Oligonucleotide
  source 1..25: mol_type = other DNA
gtaatcccagctactttggaggctg

SEQ ID NO: 29721 - DNA, 25 bp, synthetic construct
  misc_feature 1..25: note = Oligonucleotide
  source 1..25: mol_type = other DNA
cctgtaatcccagctactttggagg

SEQ ID NO: 29722 - DNA, 25 bp, synthetic construct
  misc_feature 1..25: note = Oligonucleotide
  source 1..25: mol_type = other DNA
acacctgtaatcccagctactttgg

SEQ ID NO: 29723 - DNA, 25 bp, synthetic construct
  misc_feature 1..25: note = Oligonucleotide
  source 1..25: mol_type = other DNA
cacacacctgtaatcccagctactt

SEQ ID NO: 29724 - DNA, 25 bp, synthetic construct
  misc_feature 1..25: note = Oligonucleotide
  source 1..25: mol_type = other DNA
tggcacacacctgtaatcccagcta

SEQ ID NO: 29725 - DNA, 25 bp, synthetic construct
  misc_feature 1..25: note = Oligonucleotide
  source 1..25: mol_type = other DNA
tggtggcacacacctgtaatcccag

SEQ ID NO: 29726 - DNA, 25 bp, synthetic construct
  misc_feature 1..25: note = Oligonucleotide
  source 1..25: mol_type = other DNA
gcatggtggcacacacctgtaatcc

SEQ ID NO: 29727 - DNA, 25 bp, synthetic construct
  misc_feature 1..25: note = Oligonucleotide
  source 1..25: mol_type = other DNA
tgggcatggtggcacacacctgtaa

SEQ ID NO: 29728 - DNA, 25 bp, synthetic construct
  misc_feature 1..25: note = Oligonucleotide
  source 1..25: mol_type = other DNA
agctgggcatggtggcacacacctg

SEQ ID NO: 29729 - DNA, 25 bp, synthetic construct
  misc_feature 1..25: note = Oligonucleotide
  source 1..25: mol_type = other DNA
cttagctgggcatggtggcacacac

SEQ ID NO: 29730 - DNA, 25 bp, synthetic construct
  misc_feature 1..25: note = Oligonucleotide
  source 1..25: mol_type = other DNA
aaacttagctgggcatggtggcaca

SEQ ID NO: 29731 - DNA, 25 bp, synthetic construct
  misc_feature 1..25: note = Oligonucleotide
  source 1..25: mol_type = other DNA
acaaaacttagctgggcatggtggc

SEQ ID NO: 29732 - DNA, 25 bp, synthetic construct
  misc_feature 1..25: note = Oligonucleotide
  source 1..25: mol_type = other DNA
aatacaaaacttagctgggcatggt

SEQ ID NO: 29733 - DNA, 25 bp, synthetic construct
  misc_feature 1..25: note = Oligonucleotide
  source 1..25: mol_type = other DNA
aataatacaaaacttagctgggcat

SEQ ID NO: 29734 - DNA, 25 bp, synthetic construct
  misc_feature 1..25: note = Oligonucleotide
  source 1..25: mol_type = other DNA
actaataatacaaaacttagctggg

SEQ ID NO: 29735 - DNA, 25 bp, synthetic construct
  misc_feature 1..25: note = Oligonucleotide
  source 1..25: mol_type = other DNA
tctactaataatacaaaacttagct

SEQ ID NO: 29736 - DNA, 25 bp, synthetic construct
  misc_feature 1..25: note = Oligonucleotide
  source 1..25: mol_type = other DNA
atctctactaataatacaaaactta

SEQ ID NO: 29737 - DNA, 25 bp, synthetic construct
  misc_feature 1..25: note = Oligonucleotide
  source 1..25: mol_type = other DNA
cccatctctactaataatacaaaac

SEQ ID NO: 29738 - DNA, 25 bp, synthetic construct
  misc_feature 1..25: note = Oligonucleotide
  source 1..25: mol_type = other DNA
aaccccatctctactaataatacaa

SEQ ID NO: 29739 - DNA, 25 bp, synthetic construct
  misc_feature 1..25: note = Oligonucleotide
  source 1..25: mol_type = other DNA
taaaaccccatctctactaataata

SEQ ID NO: 29740 - DNA, 25 bp, synthetic construct
  misc_feature 1..25: note = Oligonucleotide
  source 1..25: mol_type = other DNA
tggtaaaaccccatctctactaata

SEQ ID NO: 29741 - DNA, 25 bp, synthetic construct
  misc_feature 1..25: note = Oligonucleotide
  source 1..25: mol_type = other DNA
acatggtaaaaccccatctctacta

SEQ ID NO: 29742 - DNA, 25 bp, synthetic construct
  misc_feature 1..25: note = Oligonucleotide
  source 1..25: mol_type = other DNA
ccaacatggtaaaaccccatctcta

SEQ ID NO: 29743 - DNA, 25 bp, synthetic construct
  misc_feature 1..25: note = Oligonucleotide
  source 1..25: mol_type = other DNA
tgcccaacatggtaaaaccccatct

SEQ ID NO: 29744 - DNA, 25 bp, synthetic construct
  misc_feature 1..25: note = Oligonucleotide
  source 1..25: mol_type = other DNA
gcctgcccaacatggtaaaacccca

SEQ ID NO: 29745 - DNA, 25 bp, synthetic construct
  misc_feature 1..25: note = Oligonucleotide
  source 1..25: mol_type = other DNA
ccagcctgcccaacatggtaaaacc

SEQ ID NO: 29746 - DNA, 25 bp, synthetic construct
  misc_feature 1..25: note = Oligonucleotide
  source 1..25: mol_type = other DNA
agaccagcctgcccaacatggtaaa

SEQ ID NO: 29747 - DNA, 25 bp, synthetic construct
  misc_feature 1..25: note = Oligonucleotide
  source 1..25: mol_type = other DNA
tcgagaccagcctgcccaacatggt

SEQ ID NO: 29748 - DNA, 25 bp, synthetic construct
  misc_feature 1..25: note = Oligonucleotide
  source 1..25: mol_type = other DNA
agttcgagaccagcctgcccaacat

SEQ ID NO: 29749 - DNA, 25 bp, synthetic construct
  misc_feature 1..25: note = Oligonucleotide
  source 1..25: mol_type = other DNA
aagagttcgagaccagcctgcccaa

SEQ ID NO: 29750 - DNA, 25 bp, synthetic construct
  misc_feature 1..25: note = Oligonucleotide
  source 1..25: mol_type = other DNA
gtcaagagttcgagaccagcctgcc

SEQ ID NO: 29751 - DNA, 25 bp, synthetic construct
  misc_feature 1..25: note = Oligonucleotide
  source 1..25: mol_type = other DNA
gaggtcaagagttcgagaccagcct

SEQ ID NO: 29752 - DNA, 25 bp, synthetic construct
  misc_feature 1..25: note = Oligonucleotide
  source 1..25: mol_type = other DNA
cctgaggtcaagagttcgagaccag

SEQ ID NO: 29753 - DNA, 25 bp, synthetic construct
  misc_feature 1..25: note = Oligonucleotide
  source 1..25: mol_type = other DNA
tcacctgaggtcaagagttcgagac

SEQ ID NO: 29754 - DNA, 25 bp, synthetic construct
  misc_feature 1..25: note = Oligonucleotide
  source 1..25: mol_type = other DNA
ggatcacctgaggtcaagagttcga

SEQ ID NO: 29755 - DNA, 25 bp, synthetic construct
  misc_feature 1..25: note = Oligonucleotide
  source 1..25: mol_type = other DNA
ggtggatcacctgaggtcaagagtt

SEQ ID NO: 29756 - DNA, 25 bp, synthetic construct
  misc_feature 1..25: note = Oligonucleotide
  source 1..25: mol_type = other DNA
gcgggtggatcacctgaggtcaaga

SEQ ID NO: 29757 - DNA, 25 bp, synthetic construct
  misc_feature 1..25: note = Oligonucleotide
  source 1..25: mol_type = other DNA
gaggcgggtggatcacctgaggtca

SEQ ID NO: 29758 - DNA, 25 bp, synthetic construct
  misc_feature 1..25: note = Oligonucleotide
  source 1..25: mol_type = other DNA
acagaggcgggtggatcacctgagg

SEQ ID NO: 29759 - DNA, 25 bp, synthetic construct
  misc_feature 1..25: note = Oligonucleotide
  source 1..25: mol_type = other DNA
gagacagaggcgggtggatcacctg

SEQ ID NO: 29760 - DNA, 25 bp, synthetic construct
  misc_feature 1..25: note = Oligonucleotide
  source 1..25: mol_type = other DNA
tgggagacagaggcgggtggatcac

SEQ ID NO: 29761 - DNA, 25 bp, synthetic construct
  misc_feature 1..25: note = Oligonucleotide
  source 1..25: mol_type = other DNA
ctttgggagacagaggcgggtggat

SEQ ID NO: 29762 - DNA, 25 bp, synthetic construct
  misc_feature 1..25: note = Oligonucleotide
  source 1..25: mol_type = other DNA
acactttgggagacagaggcgggtg

SEQ ID NO: 29763 - DNA, 25 bp, synthetic construct
  misc_feature 1..25: note = Oligonucleotide
  source 1..25: mol_type = other DNA
ccaacactttgggagacagaggcgg

SEQ ID NO: 29764 - DNA, 25 bp, synthetic construct
  misc_feature 1..25: note = Oligonucleotide
  source 1..25: mol_type = other DNA
atcccaacactttgggagacagagg

SEQ ID NO: 29765 - DNA, 25 bp, synthetic construct
  misc_feature 1..25: note = Oligonucleotide
  source 1..25: mol_type = other DNA
gtaatcccaacactttgggagacag

SEQ ID NO: 29766 - DNA, 25 bp, synthetic construct
  misc_feature 1..25: note = Oligonucleotide
  source 1..25: mol_type = other DNA
cctgtaatcccaacactttgggaga

SEQ ID NO: 29767 - DNA, 25 bp, synthetic construct
  misc_feature 1..25: note = Oligonucleotide
  source 1..25: mol_type = other DNA
atgcctgtaatcccaacactttggg

SEQ ID NO: 29768 - DNA, 25 bp, synthetic construct
  misc_feature 1..25: note = Oligonucleotide
  source 1..25: mol_type = other DNA
ctcatgcctgtaatcccaacacttt

SEQ ID NO: 29769 - DNA, 25 bp, synthetic construct
  misc_feature 1..25: note = Oligonucleotide
  source 1..25: mol_type = other DNA
tggctcatgcctgtaatcccaacac

SEQ ID NO: 29770 - DNA, 25 bp, synthetic construct
  misc_feature 1..25: note = Oligonucleotide
  source 1..25: mol_type = other DNA
cagtggctcatgcctgtaatcccaa

SEQ ID NO: 29771 - DNA, 25 bp, synthetic construct
  misc_feature 1..25: note = Oligonucleotide
  source 1..25: mol_type = other DNA
gtgcagtggctcatgcctgtaatcc

SEQ ID NO: 29772 - DNA, 25 bp, synthetic construct
  misc_feature 1..25: note = Oligonucleotide
  source 1..25: mol_type = other DNA
cgggtgcagtggctcatgcctgtaa

SEQ ID NO: 29773 - DNA, 25 bp, synthetic construct
  misc_feature 1..25: note = Oligonucleotide
  source 1..25: mol_type = other DNA
ctccgggtgcagtggctcatgcctg

SEQ ID NO: 29774 - DNA, 25 bp, synthetic construct
  misc_feature 1..25: note = Oligonucleotide
  source 1..25: mol_type = other DNA
acactccgggtgcagtggctcatgc

SEQ ID NO: 29775 - DNA, 25 bp, synthetic construct
  misc_feature 1..25: note = Oligonucleotide
  source 1..25: mol_type = other DNA
actacactccgggtgcagtggctca

SEQ ID NO: 29776 - DNA, 25 bp, synthetic construct
  misc_feature 1..25: note = Oligonucleotide
  source 1..25: mol_type = other DNA
gttactacactccgggtgcagtggc

SEQ ID NO: 29777 - DNA, 25 bp, synthetic construct
  misc_feature 1..25: note = Oligonucleotide
  source 1..25: mol_type = other DNA
aaagttactacactccgggtgcagt

SEQ ID NO: 29778 - DNA, 25 bp, synthetic construct
  misc_feature 1..25: note = Oligonucleotide
  source 1..25: mol_type = other DNA
tcaaaagttactacactccgggtgc

SEQ ID NO: 29779 - DNA, 25 bp, synthetic construct
  misc_feature 1..25: note = Oligonucleotide
  source 1..25: mol_type = other DNA
atttcaaaagttactacactccggg

SEQ ID NO: 29780 - DNA, 25 bp, synthetic construct
  misc_feature 1..25: note = Oligonucleotide
  source 1..25: mol_type = other DNA
ctgatttcaaaagttactacactcc

SEQ ID NO: 29781 - DNA, 25 bp, synthetic construct
  misc_feature 1..25: note = Oligonucleotide
  source 1..25: mol_type = other DNA
ctcctgatttcaaaagttactacac

SEQ ID NO: 29782 - DNA, 25 bp, synthetic construct
  misc_feature 1..25: note = Oligonucleotide
  source 1..25: mol_type = other DNA
aacctcctgatttcaaaagttacta

SEQ ID NO: 29783 - DNA, 25 bp, synthetic construct
  misc_feature 1..25: note = Oligonucleotide
  source 1..25: mol_type = other DNA
tcaaacctcctgatttcaaaagtta

SEQ ID NO: 29784 - DNA, 25 bp, synthetic construct
  misc_feature 1..25: note = Oligonucleotide
  source 1..25: mol_type = other DNA
cactcaaacctcctgatttcaaaag

SEQ ID NO: 29785 - DNA, 25 bp, synthetic construct
  misc_feature 1..25: note = Oligonucleotide
  source 1..25: mol_type = other DNA
aagcactcaaacctcctgatttcaa

SEQ ID NO: 29786 - DNA, 25 bp, synthetic construct
  misc_feature 1..25: note = Oligonucleotide
  source 1..25: mol_type = other DNA
ttgaagcactcaaacctcctgattt

SEQ ID NO: 29787 - DNA, 25 bp, synthetic construct
  misc_feature 1..25: note = Oligonucleotide
  source 1..25: mol_type = other DNA
aagttgaagcactcaaacctcctga

SEQ ID NO: 29788 - DNA, 25 bp, synthetic construct
  misc_feature 1..25: note = Oligonucleotide
  source 1..25: mol_type = other DNA
aacaagttgaagcactcaaacctcc

SEQ ID NO: 29789 - DNA, 25 bp, synthetic construct
  misc_feature 1..25: note = Oligonucleotide
  source 1..25: mol_type = other DNA
aagaacaagttgaagcactcaaacc

SEQ ID NO: 29790 - DNA, 25 bp, synthetic construct
  misc_feature 1..25: note = Oligonucleotide
  source 1..25: mol_type = other DNA
aataagaacaagttgaagcactcaa

SEQ ID NO: 29791 - DNA, 25 bp, synthetic construct
  misc_feature 1..25: note = Oligonucleotide
  source 1..25: mol_type = other DNA
acaaataagaacaagttgaagcact

SEQ ID NO: 29792 - DNA, 25 bp, synthetic construct
  misc_feature 1..25: note = Oligonucleotide
  source 1..25: mol_type = other DNA
ataacaaataagaacaagttgaagc

SEQ ID NO: 29793 - DNA, 25 bp, synthetic construct
  misc_feature 1..25: note = Oligonucleotide
  source 1..25: mol_type = other DNA
acgataacaaataagaacaagttga

SEQ ID NO: 29794 - DNA, 25 bp, synthetic construct
  misc_feature 1..25: note = Oligonucleotide
  source 1..25: mol_type = other DNA
aaaacgataacaaataagaacaagt

SEQ ID NO: 29795 - DNA, 25 bp, synthetic construct
  misc_feature 1..25: note = Oligonucleotide
  source 1..25: mol_type = other DNA
gccaaaacgataacaaataagaaca

SEQ ID NO: 29796 - DNA, 25 bp, synthetic construct
  misc_feature 1..25: note = Oligonucleotide
  source 1..25: mol_type = other DNA
ttagccaaaacgataacaaataaga

SEQ ID NO: 29797 - DNA, 25 bp, synthetic construct
  misc_feature 1..25: note = Oligonucleotide
  source 1..25: mol_type = other DNA
tgattagccaaaacgataacaaata

SEQ ID NO: 29798 - DNA, 25 bp, synthetic construct
  misc_feature 1..25: note = Oligonucleotide
  source 1..25: mol_type = other DNA
ccctgattagccaaaacgataacaa

SEQ ID NO: 29799 - DNA, 25 bp, synthetic construct
  misc_feature 1..25: note = Oligonucleotide
  source 1..25: mol_type = other DNA
gggccctgattagccaaaacgataa

SEQ ID NO: 29800 - DNA, 25 bp, synthetic construct
  misc_feature 1..25: note = Oligonucleotide
  source 1..25: mol_type = other DNA
caggggccctgattagccaaaacga

SEQ ID NO: 29801 - DNA, 25 bp, synthetic construct
  misc_feature 1..25: note = Oligonucleotide
  source 1..25: mol_type = other DNA
tgccaggggccctgattagccaaaa

SEQ ID NO: 29802 - DNA, 25 bp, synthetic construct
  misc_feature 1..25: note = Oligonucleotide
  source 1..25: mol_type = other DNA
aattgccaggggccctgattagcca

SEQ ID NO: 29803 - DNA, 25 bp, synthetic construct
  misc_feature 1..25: note = Oligonucleotide
  source 1..25: mol_type = other DNA
tggaattgccaggggccctgattag

SEQ ID NO: 29804 - DNA, 25 bp, synthetic construct
  misc_feature 1..25: note = Oligonucleotide
  source 1..25: mol_type = other DNA
atatggaattgccaggggccctgat

SEQ ID NO: 29805 - DNA, 25 bp, synthetic construct
  misc_feature 1..25: note = Oligonucleotide
  source 1..25: mol_type = other DNA
tctatatggaattgccaggggccct

SEQ ID NO: 29806 - DNA, 25 bp, synthetic construct
  misc_feature 1..25: note = Oligonucleotide
  source 1..25: mol_type = other DNA
aagtctatatggaattgccaggggc

SEQ ID NO: 29807 - DNA, 25 bp, synthetic construct
  misc_feature 1..25: note = Oligonucleotide
  source 1..25: mol_type = other DNA
ttcaagtctatatggaattgccagg

SEQ ID NO: 29808 - DNA, 25 bp, synthetic construct
  misc_feature 1..25: note = Oligonucleotide
  source 1..25: mol_type = other DNA
atgttcaagtctatatggaattgcc

SEQ ID NO: 29809 - DNA, 25 bp, synthetic construct
  misc_feature 1..25: note = Oligonucleotide
  source 1..25: mol_type = other DNA
gcaatgttcaagtctatatggaatt

SEQ ID NO: 29810 - DNA, 25 bp, synthetic construct
  misc_feature 1..25: note = Oligonucleotide
  source 1..25: mol_type = other DNA
aaagcaatgttcaagtctatatgga

SEQ ID NO: 29811 - DNA, 25 bp, synthetic construct
  misc_feature 1..25: note = Oligonucleotide
  source 1..25: mol_type = other DNA
agaaaagcaatgttcaagtctatat

SEQ ID NO: 29812 - DNA, 25 bp, synthetic construct
  misc_feature 1..25: note = Oligonucleotide
  source 1..25: mol_type = other DNA
aatagaaaagcaatgttcaagtcta

SEQ ID NO: 29813 - DNA, 25 bp, synthetic construct
  misc_feature 1..25: note = Oligonucleotide
  source 1..25: mol_type = other DNA
acaaatagaaaagcaatgttcaagt

SEQ ID NO: 29814 - DNA, 25 bp, synthetic construct
  misc_feature 1..25: note = Oligonucleotide
  source 1..25: mol_type = other DNA
tgcacaaatagaaaagcaatgttca

SEQ ID NO: 29815 - DNA, 25 bp, synthetic construct
  misc_feature 1..25: note = Oligonucleotide
  source 1..25: mol_type = other DNA
ttttgcacaaatagaaaagcaatgt

SEQ ID NO: 29816 - DNA, 25 bp, synthetic construct
  misc_feature 1..25: note = Oligonucleotide
  source 1..25: mol_type = other DNA
cctttttgcacaaatagaaaagcaa

SEQ ID NO: 29817 - DNA, 25 bp, synthetic construct
  misc_feature 1..25: note = Oligonucleotide
  source 1..25: mol_type = other DNA
gtccctttttgcacaaatagaaaag

SEQ ID NO: 29818 - DNA, 25 bp, synthetic construct
  misc_feature 1..25: note = Oligonucleotide
  source 1..25: mol_type = other DNA
aatgtccctttttgcacaaatagaa

SEQ ID NO: 29819 - DNA, 25 bp, synthetic construct
  misc_feature 1..25: note = Oligonucleotide
  source 1..25: mol_type = other DNA
tccaatgtccctttttgcacaaata

SEQ ID NO: 29820 - DNA, 25 bp, synthetic construct
  misc_feature 1..25: note = Oligonucleotide
  source 1..25: mol_type = other DNA
aattccaatgtccctttttgcacaa

SEQ ID NO: 29821 - DNA, 25 bp, synthetic construct
  misc_feature 1..25: note = Oligonucleotide
  source 1..25: mol_type = other DNA
caaaattccaatgtccctttttgca

SEQ ID NO: 29822 - DNA, 25 bp, synthetic construct
  misc_feature 1..25: note = Oligonucleotide
  source 1..25: mol_type = other DNA
atgcaaaattccaatgtcccttttt

SEQ ID NO: 29823 - DNA, 25 bp, synthetic construct
  misc_feature 1..25: note = Oligonucleotide
  source 1..25: mol_type = other DNA
tcaatgcaaaattccaatgtccctt

SEQ ID NO: 29824 - DNA, 25 bp, synthetic construct
  misc_feature 1..25: note = Oligonucleotide
  source 1..25: mol_type = other DNA
gattcaatgcaaaattccaatgtcc

SEQ ID NO: 29825 - DNA, 25 bp, synthetic construct
  misc_feature 1..25: note = Oligonucleotide
  source 1..25: mol_type = other DNA
acagattcaatgcaaaattccaatg

SEQ ID NO: 29826 - DNA, 25 bp, synthetic construct
  misc_feature 1..25: note = Oligonucleotide
  source 1..25: mol_type = other DNA
atgacagattcaatgcaaaattcca

SEQ ID NO: 29827 - DNA, 25 bp, synthetic construct
  misc_feature 1..25: note = Oligonucleotide
  source 1..25: mol_type = other DNA
gtgatgacagattcaatgcaaaatt

SEQ ID NO: 29828 - DNA, 25 bp, synthetic construct
  misc_feature 1..25: note = Oligonucleotide
  source 1..25: mol_type = other DNA
agagtgatgacagattcaatgcaaa

SEQ ID NO: 29829 - DNA, 25 bp, synthetic construct
  misc_feature 1..25: note = Oligonucleotide
  source 1..25: mol_type = other DNA
cccagagtgatgacagattcaatgc

SEQ ID NO: 29830 - DNA, 25 bp, synthetic construct
  misc_feature 1..25: note = Oligonucleotide
  source 1..25: mol_type = other DNA
tcacccagagtgatgacagattcaa

SEQ ID NO: 29831 - DNA, 25 bp, synthetic construct
  misc_feature 1..25: note = Oligonucleotide
  source 1..25: mol_type = other DNA
atgtcacccagagtgatgacagatt

SEQ ID NO: 29832 - DNA, 25 bp, synthetic construct
  misc_feature 1..25: note = Oligonucleotide
  source 1..25: mol_type = other DNA
ttaatgtcacccagagtgatgacag

SEQ ID NO: 29833 - DNA, 25 bp, synthetic construct
  misc_feature 1..25: note = Oligonucleotide
  source 1..25: mol_type = other DNA
atgttaatgtcacccagagtgatga

SEQ ID NO: 29834 - DNA, 25 bp, synthetic construct
  misc_feature 1..25: note = Oligonucleotide
  source 1..25: mol_type = other DNA
aaaatgttaatgtcacccagagtga

SEQ ID NO: 29835 - DNA, 25 bp, synthetic construct
  misc_feature 1..25: note = Oligonucleotide
  source 1..25: mol_type = other DNA
gttaaaatgttaatgtcacccagag

SEQ ID NO: 29836 - DNA, 25 bp, synthetic construct
  misc_feature 1..25: note = Oligonucleotide
  source 1..25: mol_type = other DNA
ggtgttaaaatgttaatgtcaccca

SEQ ID NO: 29837 - DNA, 25 bp, synthetic construct
  misc_feature 1..25: note = Oligonucleotide
  source 1..25: mol_type = other DNA
aatggtgttaaaatgttaatgtcac

SEQ ID NO: 29838 - DNA, 25 bp, synthetic construct
  misc_feature 1..25: note = Oligonucleotide
  source 1..25: mol_type = other DNA
gacaatggtgttaaaatgttaatgt

SEQ ID NO: 29839 - DNA, 25 bp, synthetic construct
  misc_feature 1..25: note = Oligonucleotide
  source 1..25: mol_type = other DNA
gaagacaatggtgttaaaatgttaa

SEQ ID NO: 29840 - DNA, 25 bp, synthetic construct
  misc_feature 1..25: note = Oligonucleotide
  source 1..25: mol_type = other DNA
ttggaagacaatggtgttaaaatgt

SEQ ID NO: 29841 - DNA, 25 bp, synthetic construct
  misc_feature 1..25: note = Oligonucleotide
  source 1..25: mol_type = other DNA
taattggaagacaatggtgttaaaa

SEQ ID NO: 29842 - DNA, 25 bp, synthetic construct
  misc_feature 1..25: note = Oligonucleotide
  source 1..25: mol_type = other DNA
cattaattggaagacaatggtgtta

SEQ ID NO: 29843 - DNA, 25 bp, synthetic construct
  misc_feature 1..25: note = Oligonucleotide
  source 1..25: mol_type = other DNA
gttcattaattggaagacaatggtg

SEQ ID NO: 29844 - DNA, 25 bp, synthetic construct
  misc_feature 1..25: note = Oligonucleotide
  source 1..25: mol_type = other DNA
catgttcattaattggaagacaatg

SEQ ID NO: 29845 - DNA, 25 bp, synthetic construct
  misc_feature 1..25: note = Oligonucleotide
  source 1..25: mol_type = other DNA
tcccatgttcattaattggaagaca

SEQ ID NO: 29846 - DNA, 25 bp, synthetic construct
  misc_feature 1..25: note = Oligonucleotide
  source 1..25: mol_type = other DNA
acatcccatgttcattaattggaag

SEQ ID NO: 29847 - DNA, 25 bp, synthetic construct
  misc_feature 1..25: note = Oligonucleotide
  source 1..25: mol_type = other DNA
aggacatcccatgttcattaattgg

SEQ ID NO: 29848 - DNA, 25 bp, synthetic construct
  misc_feature 1..25: note = Oligonucleotide
  source 1..25: mol_type = other DNA
aaaaggacatcccatgttcattaat

SEQ ID NO: 29849 - DNA, 25 bp, synthetic construct
  misc_feature 1..25: note = Oligonucleotide
  source 1..25: mol_type = other DNA
aataaaaggacatcccatgttcatt

SEQ ID NO: 29850 - DNA, 25 bp, synthetic construct
  misc_feature 1..25: note = Oligonucleotide
  source 1..25: mol_type = other DNA
ataaataaaaggacatcccatgttc

SEQ ID NO: 29851 - DNA, 25 bp, synthetic construct
  misc_feature 1..25: note = Oligonucleotide
  source 1..25: mol_type = other DNA
taaataaataaaaggacatcccatg

SEQ ID NO: 29852 - DNA, 25 bp, synthetic construct
  misc_feature 1..25: note = Oligonucleotide
  source 1..25: mol_type = other DNA
acctaaataaataaaaggacatccc

SEQ ID NO: 29853 - DNA, 25 bp, synthetic construct
  misc_feature 1..25: note = Oligonucleotide
  source 1..25: mol_type = other DNA
atgacctaaataaataaaaggacat

SEQ ID NO: 29854 - DNA, 25 bp, synthetic construct
  misc_feature 1..25: note = Oligonucleotide
  source 1..25: mol_type = other DNA
gagatgacctaaataaataaaagga

SEQ ID NO: 29855 - DNA, 25 bp, synthetic construct
  misc_feature 1..25: note = Oligonucleotide
  source 1..25: mol_type = other DNA
ttagagatgacctaaataaataaaa

SEQ ID NO: 29856 - DNA, 25 bp, synthetic construct
  misc_feature 1..25: note = Oligonucleotide
  source 1..25: mol_type = other DNA
tgcttagagatgacctaaataaata

SEQ ID NO: 29857 - DNA, 25 bp, synthetic construct
  misc_feature 1..25: note = Oligonucleotide
  source 1..25: mol_type = other DNA
cactgcttagagatgacctaaataa

SEQ ID NO: 29858 - DNA, 25 bp, synthetic construct
  misc_feature 1..25: note = Oligonucleotide
  source 1..25: mol_type = other DNA
aaacactgcttagagatgacctaaa

SEQ ID NO: 29859 - DNA, 25 bp, synthetic construct
  misc_feature 1..25: note = Oligonucleotide
  source 1..25: mol_type = other DNA
acaaaacactgcttagagatgacct

SEQ ID NO: 29860 - DNA, 25 bp, synthetic construct
  misc_feature 1..25: note = Oligonucleotide
  source 1..25: mol_type = other DNA
atgacaaaacactgcttagagatga

SEQ ID NO: 29861 - DNA, 25 bp, synthetic construct
  misc_feature 1..25: note = Oligonucleotide
  source 1..25: mol_type = other DNA
aaaatgacaaaacactgcttagaga

SEQ ID NO: 29862 - DNA, 25 bp, synthetic construct
  misc_feature 1..25: note = Oligonucleotide
  source 1..25: mol_type = other DNA
ctgaaaatgacaaaacactgcttag

SEQ ID NO: 29863 - DNA, 25 bp, synthetic construct
  misc_feature 1..25: note = Oligonucleotide
  source 1..25: mol_type = other DNA
atactgaaaatgacaaaacactgct

SEQ ID NO: 29864 - DNA, 25 bp, synthetic construct
  misc_feature 1..25: note = Oligonucleotide
  source 1..25: mol_type = other DNA
tatatactgaaaatgacaaaacact

SEQ ID NO: 29865 - DNA, 25 bp, synthetic construct
  misc_feature 1..25: note = Oligonucleotide
  source 1..25: mol_type = other DNA
atctatatactgaaaatgacaaaac

SEQ ID NO: 29866 - DNA, 25 bp, synthetic construct
  misc_feature 1..25: note = Oligonucleotide
  source 1..25: mol_type = other DNA
aaaatctatatactgaaaatgacaa

SEQ ID NO: 29867 - DNA, 25 bp, synthetic construct
  misc_feature 1..25: note = Oligonucleotide
  source 1..25: mol_type = other DNA
aaaaaaatctatatactgaaaatga

SEQ ID NO: 29868 - DNA, 25 bp, synthetic construct
  misc_feature 1..25: note = Oligonucleotide
  source 1..25: mol_type = other DNA
agtaaaaaaatctatatactgaaaa

SEQ ID NO: 29869 - DNA, 25 bp, synthetic construct
  misc_feature 1..25: note = Oligonucleotide
  source 1..25: mol_type = other DNA
ggaagtaaaaaaatctatatactga

SEQ ID NO: 29870 - DNA, 25 bp, synthetic construct
  misc_feature 1..25: note = Oligonucleotide
  source 1..25: mol_type = other DNA
taaggaagtaaaaaaatctatatac

SEQ ID NO: 29871 - DNA, 25 bp, synthetic construct
  misc_feature 1..25: note = Oligonucleotide
  source 1..25: mol_type = other DNA
aactaaggaagtaaaaaaatctata

SEQ ID NO: 29872 - DNA, 25 bp, synthetic construct
  misc_feature 1..25: note = Oligonucleotide
  source 1..25: mol_type = other DNA
tttaactaaggaagtaaaaaaatct

SEQ ID NO: 29873 - DNA, 25 bp, synthetic construct
  misc_feature 1..25: note = Oligonucleotide
  source 1..25: mol_type = other DNA
aaatttaactaaggaagtaaaaaaa

SEQ ID NO: 29874 - DNA, 25 bp, synthetic construct
  misc_feature 1..25: note = Oligonucleotide
  source 1..25: mol_type = other DNA
aataaatttaactaaggaagtaaaa

SEQ ID NO: 29875 - DNA, 25 bp, synthetic construct
  misc_feature 1..25: note = Oligonucleotide
  source 1..25: mol_type = other DNA
aagaataaatttaactaaggaagta

SEQ ID NO: 29876 - DNA, 25 bp, synthetic construct
  misc_feature 1..25: note = Oligonucleotide
  source 1..25: mol_type = other DNA
atcaagaataaatttaactaaggaa

SEQ ID NO: 29877 - DNA, 25 bp, synthetic construct
  misc_feature 1..25: note = Oligonucleotide
  source 1..25: mol_type = other DNA
ataatcaagaataaatttaactaag

SEQ ID NO: 29878 - DNA, 25 bp, synthetic construct
  misc_feature 1..25: note = Oligonucleotide
  source 1..25: mol_type = other DNA
aaaataatcaagaataaatttaact

SEQ ID NO: 29879 - DNA, 25 bp, synthetic construct
  misc_feature 1..25: note = Oligonucleotide
  source 1..25: mol_type = other DNA
aagaaaataatcaagaataaattta

SEQ ID NO: 29880 - DNA, 25 bp, synthetic construct
  misc_feature 1..25: note = Oligonucleotide
  source 1..25: mol_type = other DNA
aagaagaaaataatcaagaataaat

SEQ ID NO: 29881 - DNA, 25 bp, synthetic construct
  misc_feature 1..25: note = Oligonucleotide
  source 1..25: mol_type = other DNA
cagaagaagaaaataatcaagaata

SEQ ID NO: 29882 - DNA, 25 bp, synthetic construct
  misc_feature 1..25: note = Oligonucleotide
  source 1..25: mol_type = other DNA
atccagaagaagaaaataatcaaga

SEQ ID NO: 29883 - DNA, 25 bp, synthetic construct
  misc_feature 1..25: note = Oligonucleotide
  source 1..25: mol_type = other DNA
agcatccagaagaagaaaataatca

SEQ ID NO: 29884 - DNA, 25 bp, synthetic construct
  misc_feature 1..25: note = Oligonucleotide
  source 1..25: mol_type = other DNA
aatagcatccagaagaagaaaataa

SEQ ID NO: 29885 - DNA, 25 bp, synthetic construct
  misc_feature 1..25: note = Oligonucleotide
  source 1..25: mol_type = other DNA
tataatagcatccagaagaagaaaa

SEQ ID NO: 29886 - DNA, 25 bp, synthetic construct
  misc_feature 1..25: note = Oligonucleotide
  source 1..25: mol_type = other DNA
atttataatagcatccagaagaaga

SEQ ID NO: 29887 - DNA, 25 bp, synthetic construct
  misc_feature 1..25: note = Oligonucleotide
  source 1..25: mol_type = other DNA
tccatttataatagcatccagaaga

SEQ ID NO: 29888 - DNA, 25 bp, synthetic construct
  misc_feature 1..25: note = Oligonucleotide
  source 1..25: mol_type = other DNA
aattccatttataatagcatccaga

SEQ ID NO: 29889 - DNA, 25 bp, synthetic construct
  misc_feature 1..25: note = Oligonucleotide
  source 1..25: mol_type = other DNA
aataattccatttataatagcatcc

SEQ ID NO: 29890 - DNA, 25 bp, synthetic construct
  misc_feature 1..25: note = Oligonucleotide
  source 1..25: mol_type = other DNA
gaaaataattccatttataatagca

SEQ ID NO: 29891 - DNA, 25 bp, synthetic construct
  misc_feature 1..25: note = Oligonucleotide
  source 1..25: mol_type = other DNA
taagaaaataattccatttataata

SEQ ID NO: 29892 - DNA, 25 bp, synthetic construct
  misc_feature 1..25: note = Oligonucleotide
  source 1..25: mol_type = other DNA
aattaagaaaataattccatttata

SEQ ID NO: 29893 - DNA, 25 bp, synthetic construct
  misc_feature 1..25: note = Oligonucleotide
  source 1..25: mol_type = other DNA
ggaaattaagaaaataattccattt

SEQ ID NO: 29894 - DNA, 25 bp, synthetic construct
  misc_feature 1..25: note = Oligonucleotide
  source 1..25: mol_type = other DNA
aaaggaaattaagaaaataattcca

SEQ ID NO: 29895 - DNA, 25 bp, synthetic construct
  misc_feature 1..25: note = Oligonucleotide
  source 1..25: mol_type = other DNA
caaaaaggaaattaagaaaataatt

SEQ ID NO: 29896 - DNA, 25 bp, synthetic construct
  misc_feature 1..25: note = Oligonucleotide
  source 1..25: mol_type = other DNA
atccaaaaaggaaattaagaaaata

SEQ ID NO: 29897 - DNA, 25 bp, synthetic construct
  misc_feature 1..25: note = Oligonucleotide
  source 1..25: mol_type = other DNA
acaatccaaaaaggaaattaagaaa

SEQ ID NO: 29898 - DNA, 25 bp, synthetic construct
  misc_feature 1..25: note = Oligonucleotide
  source 1..25: mol_type = other DNA
tgaacaatccaaaaaggaaattaag

SEQ ID NO: 29899 - DNA, 25 bp, synthetic construct
  misc_feature 1..25: note = Oligonucleotide
  source 1..25: mol_type = other DNA
caatgaacaatccaaaaaggaaatt

SEQ ID NO: 29900 - DNA, 25 bp, synthetic construct
  misc_feature 1..25: note = Oligonucleotide
  source 1..25: mol_type = other DNA
cagcaatgaacaatccaaaaaggaa

SEQ ID NO: 29901 - DNA, 25 bp, synthetic construct
  misc_feature 1..25: note = Oligonucleotide
  source 1..25: mol_type = other DNA
caccagcaatgaacaatccaaaaag

SEQ ID NO: 29902 - DNA, 25 bp, synthetic construct
  misc_feature 1..25: note = Oligonucleotide
  source 1..25: mol_type = other DNA
acacaccagcaatgaacaatccaaa

SEQ ID NO: 29903 - DNA, 25 bp, synthetic construct
  misc_feature 1..25: note = Oligonucleotide
  source 1..25: mol_type = other DNA
tttacacaccagcaatgaacaatcc

SEQ ID NO: 29904 - DNA, 25 bp, synthetic construct
  misc_feature 1..25: note = Oligonucleotide
  source 1..25: mol_type = other DNA
gtttttacacaccagcaatgaacaa

SEQ ID NO: 29905 - DNA, 25 bp, synthetic construct
  misc_feature 1..25: note = Oligonucleotide
  source 1..25: mol_type = other DNA
cttgtttttacacaccagcaatgaa

SEQ ID NO: 29906 - DNA, 25 bp, synthetic construct
  misc_feature 1..25: note = Oligonucleotide
  source 1..25: mol_type = other DNA
tcacttgtttttacacaccagcaat

SEQ ID NO: 29907 - DNA, 25 bp, synthetic construct
  misc_feature 1..25: note = Oligonucleotide
  source 1..25: mol_type = other DNA
aaatcacttgtttttacacaccagc

SEQ ID NO: 29908 - DNA, 25 bp, synthetic construct
  misc_feature 1..25: note = Oligonucleotide
  source 1..25: mol_type = other DNA
caaaaatcacttgtttttacacacc

SEQ ID NO: 29909 - DNA, 25 bp, synthetic construct
  misc_feature 1..25: note = Oligonucleotide
  source 1..25: mol_type = other DNA
acacaaaaatcacttgtttttacac

SEQ ID NO: 29910 - DNA, 25 bp, synthetic construct
  misc_feature 1..25: note = Oligonucleotide
  source 1..25: mol_type = other DNA
agcacacaaaaatcacttgttttta

SEQ ID NO: 29911 - DNA, 25 bp, synthetic construct
  misc_feature 1..25: note = Oligonucleotide
  source 1..25: mol_type = other DNA
atcagcacacaaaaatcacttgttt

SEQ ID NO: 29912 - DNA, 25 bp, synthetic construct
  misc_feature 1..25: note = Oligonucleotide
  source 1..25: mol_type = other DNA
aagatcagcacacaaaaatcacttg

SEQ ID NO: 29913 - DNA, 25 bp, synthetic construct
  misc_feature 1..25: note = Oligonucleotide
  source 1..25: mol_type = other DNA
cacaagatcagcacacaaaaatcac

SEQ ID NO: 29914 - DNA, 25 bp, synthetic construct
  misc_feature 1..25: note = Oligonucleotide
  source 1..25: mol_type = other DNA
gggcacaagatcagcacacaaaaat

SEQ ID NO: 29915 - DNA, 25 bp, synthetic construct
  misc_feature 1..25: note = Oligonucleotide
  source 1..25: mol_type = other DNA
gtagggcacaagatcagcacacaaa

SEQ ID NO: 29916 - DNA, 25 bp, synthetic construct
  misc_feature 1..25: note = Oligonucleotide
  source 1..25: mol_type = other DNA
gttgtagggcacaagatcagcacac

SEQ ID NO: 29917 - DNA, 25 bp, synthetic construct
  misc_feature 1..25: note = Oligonucleotide
  source 1..25: mol_type = other DNA
aaagttgtagggcacaagatcagca

SEQ ID NO: 29918 - DNA, 25 bp, synthetic construct
  misc_feature 1..25: note = Oligonucleotide
  source 1..25: mol_type = other DNA
agcaaagttgtagggcacaagatca

SEQ ID NO: 29919 - DNA, 25 bp, synthetic construct
  misc_feature 1..25: note = Oligonucleotide
  source 1..25: mol_type = other DNA
ttcagcaaagttgtagggcacaaga

SEQ ID NO: 29920 - DNA, 25 bp, synthetic construct
  misc_feature 1..25: note = Oligonucleotide
  source 1..25: mol_type = other DNA
aaattcagcaaagttgtagggcaca

SEQ ID NO: 29921 - DNA, 25 bp, synthetic construct
  misc_feature 1..25: note = Oligonucleotide
  source 1..25: mol_type = other DNA
aacaaattcagcaaagttgtagggc

SEQ ID NO: 29922 - DNA, 25 bp, synthetic construct
  misc_feature 1..25: note = Oligonucleotide
  source 1..25: mol_type = other DNA
ataaacaaattcagcaaagttgtag

SEQ ID NO: 29923 - DNA, 25 bp, synthetic construct
  misc_feature 1..25: note = Oligonucleotide
  source 1..25: mol_type = other DNA
ctaataaacaaattcagcaaagttg

SEQ ID NO: 29924 - DNA, 25 bp, synthetic construct
  misc_feature 1..25: note = Oligonucleotide
  source 1..25: mol_type = other DNA
gagctaataaacaaattcagcaaag

SEQ ID NO: 29925 - DNA, 25 bp, synthetic construct
  misc_feature 1..25: note = Oligonucleotide
  source 1..25: mol_type = other DNA
ctagagctaataaacaaattcagca

SEQ ID NO: 29926 - DNA, 25 bp, synthetic construct
  misc_feature 1..25: note = Oligonucleotide
  source 1..25: mol_type = other DNA
ctactagagctaataaacaaattca

SEQ ID NO: 29927 - DNA, 25 bp, synthetic construct
  misc_feature 1..25: note = Oligonucleotide
  source 1..25: mol_type = other DNA
gagctactagagctaataaacaaat

SEQ ID NO: 29928 - DNA, 25 bp, synthetic construct
  misc_feature 1..25: note = Oligonucleotide
  source 1..25: mol_type = other DNA
aaagagctactagagctaataaaca

SEQ ID NO: 29929 - DNA, 25 bp, synthetic construct
  misc_feature 1..25: note = Oligonucleotide
  source 1..25: mol_type = other DNA
ccaaaagagctactagagctaataa

SEQ ID NO: 29930 - DNA, 25 bp, synthetic construct
  misc_feature 1..25: note = Oligonucleotide
  source 1..25: mol_type = other DNA
acaccaaaagagctactagagctaa

SEQ ID NO: 29931 - DNA, 25 bp, synthetic construct
  misc_feature 1..25: note = Oligonucleotide
  source 1..25: mol_type = other DNA
aatacaccaaaagagctactagagc

SEQ ID NO: 29932 - DNA, 25 bp, synthetic construct
  misc_feature 1..25: note = Oligonucleotide
  source 1..25: mol_type = other DNA
aagaatacaccaaaagagctactag

SEQ ID NO: 29933 - DNA, 25 bp, synthetic construct
  misc_feature 1..25: note = Oligonucleotide
  source 1..25: mol_type = other DNA
ccaaagaatacaccaaaagagctac

SEQ ID NO: 29934 - DNA, 25 bp, synthetic construct
  misc_feature 1..25: note = Oligonucleotide
  source 1..25: mol_type = other DNA
atcccaaagaatacaccaaaagagc

SEQ ID NO: 29935 - DNA, 25 bp, synthetic construct
  misc_feature 1..25: note = Oligonucleotide
  source 1..25: mol_type = other DNA
aaaatcccaaagaatacaccaaaag

SEQ ID NO: 29936 - DNA, 25 bp, synthetic construct
  misc_feature 1..25: note = Oligonucleotide
  source 1..25: mol_type = other DNA
tagaaaatcccaaagaatacaccaa

SEQ ID NO: 29937 - DNA, 25 bp, synthetic construct
  misc_feature 1..25: note = Oligonucleotide
  source 1..25: mol_type = other DNA
atgtagaaaatcccaaagaatacac

SEQ ID NO: 29938 - DNA, 25 bp, synthetic construct
  misc_feature 1..25: note = Oligonucleotide
  source 1..25: mol_type = other DNA
tatatgtagaaaatcccaaagaata

SEQ ID NO: 29939 - DNA, 25 bp, synthetic construct
  misc_feature 1..25: note = Oligonucleotide
  source 1..25: mol_type = other DNA
tcctatatgtagaaaatcccaaaga

SEQ ID NO: 29940 - DNA, 25 bp, synthetic construct
  misc_feature 1..25: note = Oligonucleotide
  source 1..25: mol_type = other DNA
tgatcctatatgtagaaaatcccaa

SEQ ID NO: 29941 - DNA, 25 bp, synthetic construct
  misc_feature 1..25: note = Oligonucleotide
  source 1..25: mol_type = other DNA
gcatgatcctatatgtagaaaatcc

SEQ ID NO: 29942 - DNA, 25 bp, synthetic construct
  misc_feature 1..25: note = Oligonucleotide
  source 1..25: mol_type = other DNA
atggcatgatcctatatgtagaaaa

SEQ ID NO: 29943 - DNA, 25 bp, synthetic construct
  misc_feature 1..25: note = Oligonucleotide
  source 1..25: mol_type = other DNA
cagatggcatgatcctatatgtaga

SEQ ID NO: 29944 - DNA, 25 bp, synthetic construct
  misc_feature 1..25: note = Oligonucleotide
  source 1..25: mol_type = other DNA
ttgcagatggcatgatcctatatgt

SEQ ID NO: 29945 - DNA, 25 bp, synthetic construct
  misc_feature 1..25: note = Oligonucleotide
  source 1..25: mol_type = other DNA
tatttgcagatggcatgatcctata

SEQ ID NO: 29946 - DNA, 25 bp, synthetic construct
  misc_feature 1..25: note = Oligonucleotide
  source 1..25: mol_type = other DNA
ctctatttgcagatggcatgatcct

SEQ ID NO: 29947 - DNA, 25 bp, synthetic construct
  misc_feature 1..25: note = Oligonucleotide
  source 1..25: mol_type = other DNA
tatctctatttgcagatggcatgat

SEQ ID NO: 29948 - DNA, 25 bp, synthetic construct
  misc_feature 1..25: note = Oligonucleotide
  source 1..25: mol_type = other DNA
aactatctctatttgcagatggcat

SEQ ID NO: 29949 - DNA, 25 bp, synthetic construct
  misc_feature 1..25: note = Oligonucleotide
  source 1..25: mol_type = other DNA
taaaactatctctatttgcagatgg

SEQ ID NO: 29950 - DNA, 25 bp, synthetic construct
  misc_feature 1..25: note = Oligonucleotide
  source 1..25: mol_type = other DNA
aagtaaaactatctctatttgcaga

SEQ ID NO: 29951 - DNA, 25 bp, synthetic construct
  misc_feature 1..25: note = Oligonucleotide
  source 1..25: mol_type = other DNA
aagaagtaaaactatctctatttgc

SEQ ID NO: 29952 - DNA, 25 bp, synthetic construct
  misc_feature 1..25: note = Oligonucleotide
  source 1..25: mol_type = other DNA
aggaagaagtaaaactatctctatt

SEQ ID NO: 29953 - DNA, 25 bp, synthetic construct
  misc_feature 1..25: note = Oligonucleotide
  source 1..25: mol_type = other DNA
ggaaggaagaagtaaaactatctct

SEQ ID NO: 29954 - DNA, 25 bp, synthetic construct
  misc_feature 1..25: note = Oligonucleotide
  source 1..25: mol_type = other DNA
ttgggaaggaagaagtaaaactatc

SEQ ID NO: 29955 - DNA, 25 bp, synthetic construct
  misc_feature 1..25: note = Oligonucleotide
  source 1..25: mol_type = other DNA
aaattgggaaggaagaagtaaaact

SEQ ID NO: 29956 - DNA, 25 bp, synthetic construct
  misc_feature 1..25: note = Oligonucleotide
  source 1..25: mol_type = other DNA
cccaaattgggaaggaagaagtaaa

SEQ ID NO: 29957 - DNA, 25 bp, synthetic construct
  misc_feature 1..25: note = Oligonucleotide
  source 1..25: mol_type = other DNA
gcacccaaattgggaaggaagaagt

SEQ ID NO: 29958 - DNA, 25 bp, synthetic construct
  misc_feature 1..25: note = Oligonucleotide
  source 1..25: mol_type = other DNA
aaggcacccaaattgggaaggaaga

SEQ ID NO: 29959 - DNA, 25 bp, synthetic construct
  misc_feature 1..25: note = Oligonucleotide
  source 1..25: mol_type = other DNA
aaaaaggcacccaaattgggaagga

SEQ ID NO: 29960 - DNA, 25 bp, synthetic construct
  misc_feature 1..25: note = Oligonucleotide
  source 1..25: mol_type = other DNA
aaaaaaaaggcacccaaattgggaa

SEQ ID NO: 29961 - DNA, 25 bp, synthetic construct
  misc_feature 1..25: note = Oligonucleotide
  source 1..25: mol_type = other DNA
attaaaaaaaaggcacccaaattgg

SEQ ID NO: 29962 - DNA, 25 bp, synthetic construct
  misc_feature 1..25: note = Oligonucleotide
  source 1..25: mol_type = other DNA
aaaattaaaaaaaaggcacccaaat

SEQ ID NO: 29963 - DNA, 25 bp, synthetic construct
  misc_feature 1..25: note = Oligonucleotide
  source 1..25: mol_type = other DNA
ataaaaattaaaaaaaaggcaccca

SEQ ID NO: 29964 - DNA, 25 bp, synthetic construct
  misc_feature 1..25: note = Oligonucleotide
  source 1..25: mol_type = other DNA
aaaataaaaattaaaaaaaaggcac

SEQ ID NO: 29965 - DNA, 25 bp, synthetic construct
  misc_feature 1..25: note = Oligonucleotide
  source 1..25: mol_type = other DNA
gcaaaaataaaaattaaaaaaaagg

SEQ ID NO: 29966 - DNA, 25 bp, synthetic construct
  misc_feature 1..25: note = Oligonucleotide
  source 1..25: mol_type = other DNA
caggcaaaaataaaaattaaaaaaa

SEQ ID NO: 29967 - DNA, 25 bp, synthetic construct
  misc_feature 1..25: note = Oligonucleotide
  source 1..25: mol_type = other DNA
agacaggcaaaaataaaaattaaaa

SEQ ID NO: 29968 - DNA, 25 bp, synthetic construct
  misc_feature 1..25: note = Oligonucleotide
  source 1..25: mol_type = other DNA
tctagacaggcaaaaataaaaatta

SEQ ID NO: 29969 - DNA, 25 bp, synthetic construct
  misc_feature 1..25: note = Oligonucleotide
  source 1..25: mol_type = other DNA
agttctagacaggcaaaaataaaaa

SEQ ID NO: 29970 - DNA, 25 bp, synthetic construct
  misc_feature 1..25: note = Oligonucleotide
  source 1..25: mol_type = other DNA
gaaagttctagacaggcaaaaataa

SEQ ID NO: 29971 - DNA, 25 bp, synthetic construct
  misc_feature 1..25: note = Oligonucleotide
  source 1..25: mol_type = other DNA
actgaaagttctagacaggcaaaaa

SEQ ID NO: 29972 - DNA, 25 bp, synthetic construct
  misc_feature 1..25: note = Oligonucleotide
  source 1..25: mol_type = other DNA
cgtactgaaagttctagacaggcaa

SEQ ID NO: 29973 - DNA, 25 bp, synthetic construct
  misc_feature 1..25: note = Oligonucleotide
  source 1..25: mol_type = other DNA
caccgtactgaaagttctagacagg

SEQ ID NO: 29974 - DNA, 25 bp, synthetic construct
  misc_feature 1..25: note = Oligonucleotide
  source 1..25: mol_type = other DNA
caacaccgtactgaaagttctagac

SEQ ID NO: 29975 - DNA, 25 bp, synthetic construct
  misc_feature 1..25: note = Oligonucleotide
  source 1..25: mol_type = other DNA
attcaacaccgtactgaaagttcta

SEQ ID NO: 29976 - DNA, 25 bp, synthetic construct
  misc_feature 1..25: note = Oligonucleotide
  source 1..25: mol_type = other DNA
ggtattcaacaccgtactgaaagtt

SEQ ID NO: 29977 - DNA, 25 bp, synthetic construct
  misc_feature 1..25: note = Oligonucleotide
  source 1..25: mol_type = other DNA
actggtattcaacaccgtactgaaa

SEQ ID NO: 29978 - DNA, 25 bp, synthetic construct
  misc_feature 1..25: note = Oligonucleotide
  source 1..25: mol_type = other DNA
actactggtattcaacaccgtactg

SEQ ID NO: 29979 - DNA, 25 bp, synthetic construct
  misc_feature 1..25: note = Oligonucleotide
  source 1..25: mol_type = other DNA
tttactactggtattcaacaccgta

SEQ ID NO: 29980 - DNA, 25 bp, synthetic construct
  misc_feature 1..25: note = Oligonucleotide
  source 1..25: mol_type = other DNA
gcttttactactggtattcaacacc

SEQ ID NO: 29981 - DNA, 25 bp, synthetic construct
  misc_feature 1..25: note = Oligonucleotide
  source 1..25: mol_type = other DNA
cctgcttttactactggtattcaac

SEQ ID NO: 29982 - DNA, 25 bp, synthetic construct
  misc_feature 1..25: note = Oligonucleotide
  source 1..25: mol_type = other DNA
atgcctgcttttactactggtattc

SEQ ID NO: 29983 - DNA, 25 bp, synthetic construct
  misc_feature 1..25: note = Oligonucleotide
  source 1..25: mol_type = other DNA
aagatgcctgcttttactactggta

SEQ ID NO: 29984 - DNA, 25 bp, synthetic construct
  misc_feature 1..25: note = Oligonucleotide
  source 1..25: mol_type = other DNA
gcaaagatgcctgcttttactactg

SEQ ID NO: 29985 - DNA, 25 bp, synthetic construct
  misc_feature 1..25: note = Oligonucleotide
  source 1..25: mol_type = other DNA
aaggcaaagatgcctgcttttacta

SEQ ID NO: 29986 - DNA, 25 bp, synthetic construct
  misc_feature 1..25: note = Oligonucleotide
  source 1..25: mol_type = other DNA
aacaaggcaaagatgcctgctttta

SEQ ID NO: 29987 - DNA, 25 bp, synthetic construct
  misc_feature 1..25: note = Oligonucleotide
  source 1..25: mol_type = other DNA
aggaacaaggcaaagatgcctgctt

SEQ ID NO: 29988 - DNA, 25 bp, synthetic construct
  misc_feature 1..25: note = Oligonucleotide
  source 1..25: mol_type = other DNA
atcaggaacaaggcaaagatgcctg

SEQ ID NO: 29989 - DNA, 25 bp, synthetic construct
  misc_feature 1..25: note = Oligonucleotide
  source 1..25: mol_type = other DNA
aagatcaggaacaaggcaaagatgc

SEQ ID NO: 29990 - DNA, 25 bp, synthetic construct
  misc_feature 1..25: note = Oligonucleotide
  source 1..25: mol_type = other DNA
cctaagatcaggaacaaggcaaaga

SEQ ID NO: 29991 - DNA, 25 bp, synthetic construct
  misc_feature 1..25: note = Oligonucleotide
  source 1..25: mol_type = other DNA
ccccctaagatcaggaacaaggcaa

SEQ ID NO: 29992 - DNA, 25 bp, synthetic construct
  misc_feature 1..25: note = Oligonucleotide
  source 1..25: mol_type = other DNA
tttccccctaagatcaggaacaagg

SEQ ID NO: 29993 - DNA, 25 bp, synthetic construct
  misc_feature 1..25: note = Oligonucleotide
  source 1..25: mol_type = other DNA
tgctttccccctaagatcaggaaca

SEQ ID NO: 29994 - DNA, 25 bp, synthetic construct
  misc_feature 1..25: note = Oligonucleotide
  source 1..25: mol_type = other DNA
gaatgctttccccctaagatcagga

SEQ ID NO: 29995 - DNA, 25 bp, synthetic construct
  misc_feature 1..25: note = Oligonucleotide
  source 1..25: mol_type = other DNA
attgaatgctttccccctaagatca

SEQ ID NO: 29996 - DNA, 25 bp, synthetic construct
  misc_feature 1..25: note = Oligonucleotide
  source 1..25: mol_type = other DNA
aagattgaatgctttccccctaaga

SEQ ID NO: 29997 - DNA, 25 bp, synthetic construct
  misc_feature 1..25: note = Oligonucleotide
  source 1..25: mol_type = other DNA
tgaaagattgaatgctttcccccta

SEQ ID NO: 29998 - DNA, 25 bp, synthetic construct
  misc_feature 1..25: note = Oligonucleotide
  source 1..25: mol_type = other DNA
tggtgaaagattgaatgctttcccc

SEQ ID NO: 29999 - DNA, 25 bp, synthetic construct
  misc_feature 1..25: note = Oligonucleotide
  source 1..25: mol_type = other DNA
caatggtgaaagattgaatgctttc

SEQ ID NO: 30000 - DNA, 25 bp, synthetic construct
  misc_feature 1..25: note = Oligonucleotide
  source 1..25: mol_type = other DNA
acacaatggtgaaagattgaatgct

SEQ ID NO: 30001 - DNA, 25 bp, synthetic construct
  misc_feature 1..25: note = Oligonucleotide
  source 1..25: mol_type = other DNA
catacacaatggtgaaagattgaat

SEQ ID NO: 30002 - DNA, 25 bp, synthetic construct
  misc_feature 1..25: note = Oligonucleotide
  source 1..25: mol_type = other DNA
caccatacacaatggtgaaagattg

SEQ ID NO: 30003 - DNA, 25 bp, synthetic construct
  misc_feature 1..25: note = Oligonucleotide
  source 1..25: mol_type = other DNA
tagcaccatacacaatggtgaaaga

SEQ ID NO: 30004 - DNA, 25 bp, synthetic construct
  misc_feature 1..25: note = Oligonucleotide
  source 1..25: mol_type = other DNA
agatagcaccatacacaatggtgaa

SEQ ID NO: 30005 - DNA, 25 bp, synthetic construct
  misc_feature 1..25: note = Oligonucleotide
  source 1..25: mol_type = other DNA
catagatagcaccatacacaatggt

SEQ ID NO: 30006 - DNA, 25 bp, synthetic construct
  misc_feature 1..25: note = Oligonucleotide
  source 1..25: mol_type = other DNA
acacatagatagcaccatacacaat

SEQ ID NO: 30007 - DNA, 25 bp, synthetic construct
  misc_feature 1..25: note = Oligonucleotide
  source 1..25: mol_type = other DNA
aacacacatagatagcaccatacac

SEQ ID NO: 30008 - DNA, 25 bp, synthetic construct
  misc_feature 1..25: note = Oligonucleotide
  source 1..25: mol_type = other DNA
aaaaacacacatagatagcaccata

SEQ ID NO: 30009 - DNA, 25 bp, synthetic construct
  misc_feature 1..25: note = Oligonucleotide
  source 1..25: mol_type = other DNA
aaaaaaaacacacatagatagcacc

SEQ ID NO: 30010 - DNA, 25 bp, synthetic construct
  misc_feature 1..25: note = Oligonucleotide
  source 1..25: mol_type = other DNA
aacaaaaaaaacacacatagatagc

SEQ ID NO: 30011 - DNA, 25 bp, synthetic construct
  misc_feature 1..25: note = Oligonucleotide
  source 1..25: mol_type = other DNA
acaaacaaaaaaaacacacatagat

SEQ ID NO: 30012 - DNA, 25 bp, synthetic construct
  misc_feature 1..25: note = Oligonucleotide
  source 1..25: mol_type = other DNA
caaacaaacaaaaaaaacacacata

SEQ ID NO: 30013 - DNA, 25 bp, synthetic construct
  misc_feature 1..25: note = Oligonucleotide
  source 1..25: mol_type = other DNA
aaacaaacaaacaaaaaaaacacac

SEQ ID NO: 30014 - DNA, 25 bp, synthetic construct
  misc_feature 1..25: note = Oligonucleotide
  source 1..25: mol_type = other DNA
aaaaaacaaacaaacaaaaaaaaca

SEQ ID NO: 30015 - DNA, 25 bp, synthetic construct
  misc_feature 1..25: note = Oligonucleotide
  source 1..25: mol_type = other DNA
aacaaaaaacaaacaaacaaaaaaa

SEQ ID NO: 30016 - DNA, 25 bp, synthetic construct
  misc_feature 1..25: note = Oligonucleotide
  source 1..25: mol_type = other DNA
aaaaacaaaaaacaaacaaacaaaa

SEQ ID NO: 30017 - DNA, 25 bp, synthetic construct
  misc_feature 1..25: note = Oligonucleotide
  source 1..25: mol_type = other DNA
ttaaaaaacaaaaaacaaacaaaca

SEQ ID NO: 30018 - DNA, 25 bp, synthetic construct
  misc_feature 1..25: note = Oligonucleotide
  source 1..25: mol_type = other DNA
tatttaaaaaacaaaaaacaaacaa

SEQ ID NO: 30019 - DNA, 25 bp, synthetic construct
  misc_feature 1..25: note = Oligonucleotide
  source 1..25: mol_type = other DNA
ccatatttaaaaaacaaaaaacaaa

SEQ ID NO: 30020 - DNA, 25 bp, synthetic construct
  misc_feature 1..25: note = Oligonucleotide
  source 1..25: mol_type = other DNA
attccatatttaaaaaacaaaaaac

SEQ ID NO: 30021 - DNA, 25 bp, synthetic construct
  misc_feature 1..25: note = Oligonucleotide
  source 1..25: mol_type = other DNA
agcattccatatttaaaaaacaaaa

SEQ ID NO: 30022 - DNA, 25 bp, synthetic construct
  misc_feature 1..25: note = Oligonucleotide
  source 1..25: mol_type = other DNA
tgaagcattccatatttaaaaaaca

SEQ ID NO: 30023 - DNA, 25 bp, synthetic construct
  misc_feature 1..25: note = Oligonucleotide
  source 1..25: mol_type = other DNA
taatgaagcattccatatttaaaaa

SEQ ID NO: 30024 - DNA, 25 bp, synthetic construct
  misc_feature 1..25: note = Oligonucleotide
  source 1..25: mol_type = other DNA
aattaatgaagcattccatatttaa

SEQ ID NO: 30025 - DNA, 25 bp, synthetic construct
  misc_feature 1..25: note = Oligonucleotide
  source 1..25: mol_type = other DNA
gcaaattaatgaagcattccatatt

SEQ ID NO: 30026 - DNA, 25 bp, synthetic construct
  misc_feature 1..25: note = Oligonucleotide
  source 1..25: mol_type = other DNA
catgcaaattaatgaagcattccat

SEQ ID NO: 30027 - DNA, 25 bp, synthetic construct
  misc_feature 1..25: note = Oligonucleotide
  source 1..25: mol_type = other DNA
tgacatgcaaattaatgaagcattc

SEQ ID NO: 30028 - DNA, 25 bp, synthetic construct
  misc_feature 1..25: note = Oligonucleotide
  source 1..25: mol_type = other DNA
ggatgacatgcaaattaatgaagca

SEQ ID NO: 30029 - DNA, 25 bp, synthetic construct
  misc_feature 1..25: note = Oligonucleotide
  source 1..25: mol_type = other DNA
caaggatgacatgcaaattaatgaa

SEQ ID NO: 30030 - DNA, 25 bp, synthetic construct
  misc_feature 1..25: note = Oligonucleotide
  source 1..25: mol_type = other DNA
gcacaaggatgacatgcaaattaat

SEQ ID NO: 30031 - DNA, 25 bp, synthetic construct
  misc_feature 1..25: note = Oligonucleotide
  source 1..25: mol_type = other DNA
cctgcacaaggatgacatgcaaatt

SEQ ID NO: 30032 - DNA, 25 bp, synthetic construct
  misc_feature 1..25: note = Oligonucleotide
  source 1..25: mol_type = other DNA
tcccctgcacaaggatgacatgcaa

SEQ ID NO: 30033 - DNA, 25 bp, synthetic construct
  misc_feature 1..25: note = Oligonucleotide
  source 1..25: mol_type = other DNA
atgtcccctgcacaaggatgacatg

SEQ ID NO: 30034 - DNA, 25 bp, synthetic construct
  misc_feature 1..25: note = Oligonucleotide
  source 1..25: mol_type = other DNA
agcatgtcccctgcacaaggatgac

SEQ ID NO: 30035 - DNA, 25 bp, synthetic construct
  misc_feature 1..25: note = Oligonucleotide
  source 1..25: mol_type = other DNA
attagcatgtcccctgcacaaggat

SEQ ID NO: 30036 - DNA, 25 bp, synthetic construct
  misc_feature 1..25: note = Oligonucleotide
  source 1..25: mol_type = other DNA
gagattagcatgtcccctgcacaag

SEQ ID NO: 30037 - DNA, 25 bp, synthetic construct
  misc_feature 1..25: note = Oligonucleotide
  source 1..25: mol_type = other DNA
tcagagattagcatgtcccctgcac

SEQ ID NO: 30038 - DNA, 25 bp, synthetic construct
  misc_feature 1..25: note = Oligonucleotide
  source 1..25: mol_type = other DNA
gattcagagattagcatgtcccctg

SEQ ID NO: 30039 - DNA, 25 bp, synthetic construct
  misc_feature 1..25: note = Oligonucleotide
  source 1..25: mol_type = other DNA
aatgattcagagattagcatgtccc

SEQ ID NO: 30040 - DNA, 25 bp, synthetic construct
  misc_feature 1..25: note = Oligonucleotide
  source 1..25: mol_type = other DNA
tagaatgattcagagattagcatgt

SEQ ID NO: 30041 - DNA, 25 bp, synthetic construct
  misc_feature 1..25: note = Oligonucleotide
  source 1..25: mol_type = other DNA
aattagaatgattcagagattagca

SEQ ID NO: 30042 - DNA, 25 bp, synthetic construct
  misc_feature 1..25: note = Oligonucleotide
  source 1..25: mol_type = other DNA
taaaattagaatgattcagagatta

SEQ ID NO: 30043 - DNA, 25 bp, synthetic construct
  misc_feature 1..25: note = Oligonucleotide
  source 1..25: mol_type = other DNA
tactaaaattagaatgattcagaga

SEQ ID NO: 30044 - DNA, 25 bp, synthetic construct
  misc_feature 1..25: note = Oligonucleotide
  source 1..25: mol_type = other DNA
atatactaaaattagaatgattcag

SEQ ID NO: 30045 - DNA, 25 bp, synthetic construct
  misc_feature 1..25: note = Oligonucleotide
  source 1..25: mol_type = other DNA
cacatatactaaaattagaatgatt

SEQ ID NO: 30046 - DNA, 25 bp, synthetic construct
  misc_feature 1..25: note = Oligonucleotide
  source 1..25: mol_type = other DNA
cagcacatatactaaaattagaatg

SEQ ID NO: 30047 - DNA, 25 bp, synthetic construct
  misc_feature 1..25: note = Oligonucleotide
  source 1..25: mol_type = other DNA
ctgcagcacatatactaaaattaga

SEQ ID NO: 30048 - DNA, 25 bp, synthetic construct
  misc_feature 1..25: note = Oligonucleotide
  source 1..25: mol_type = other DNA
cttctgcagcacatatactaaaatt

SEQ ID NO: 30049 - DNA, 25 bp, synthetic construct
  misc_feature 1..25: note = Oligonucleotide
  source 1..25: mol_type = other DNA
ttgcttctgcagcacatatactaaa

SEQ ID NO: 30050 - DNA, 25 bp, synthetic construct
  misc_feature 1..25: note = Oligonucleotide
  source 1..25: mol_type = other DNA
tgcttgcttctgcagcacatatact

SEQ ID NO: 30051 - DNA, 25 bp, synthetic construct
  misc_feature 1..25: note = Oligonucleotide
  source 1..25: mol_type = other DNA
aagtgcttgcttctgcagcacatat

SEQ ID NO: 30052 - DNA, 25 bp, synthetic construct
  misc_feature 1..25: note = Oligonucleotide
  source 1..25: mol_type = other DNA
ccgaagtgcttgcttctgcagcaca

SEQ ID NO: 30053 - DNA, 25 bp, synthetic construct
  misc_feature 1..25: note = Oligonucleotide
  source 1..25: mol_type = other DNA
aatccgaagtgcttgcttctgcagc

SEQ ID NO: 30054 - DNA, 25 bp, synthetic construct
  misc_feature 1..25: note = Oligonucleotide
  source 1..25: mol_type = other DNA
aaaaatccgaagtgcttgcttctgc

SEQ ID NO: 30055 - DNA, 25 bp, synthetic construct
  misc_feature 1..25: note = Oligonucleotide
  source 1..25: mol_type = other DNA
attaaaaatccgaagtgcttgcttc

SEQ ID NO: 30056 - DNA, 25 bp, synthetic construct
  misc_feature 1..25: note = Oligonucleotide
  source 1..25: mol_type = other DNA
tttattaaaaatccgaagtgcttgc

SEQ ID NO: 30057 - DNA, 25 bp, synthetic construct
  misc_feature 1..25: note = Oligonucleotide
  source 1..25: mol_type = other DNA
aaatttattaaaaatccgaagtgct

SEQ ID NO: 30058 - DNA, 25 bp, synthetic construct
  misc_feature 1..25: note = Oligonucleotide
  source 1..25: mol_type = other DNA
aggaaatttattaaaaatccgaagt

SEQ ID NO: 30059 - DNA, 25 bp, synthetic construct
  misc_feature 1..25: note = Oligonucleotide
  source 1..25: mol_type = other DNA
taaaggaaatttattaaaaatccga

SEQ ID NO: 30060 - DNA, 25 bp, synthetic construct
  misc_feature 1..25: note = Oligonucleotide
  source 1..25: mol_type = other DNA
taataaaggaaatttattaaaaatc

SEQ ID NO: 30061 - DNA, 25 bp, synthetic construct
  misc_feature 1..25: note = Oligonucleotide
  source 1..25: mol_type = other DNA
acataataaaggaaatttattaaaa

SEQ ID NO: 30062 - DNA, 25 bp, synthetic construct
  misc_feature 1..25: note = Oligonucleotide
  source 1..25: mol_type = other DNA
tcaacataataaaggaaatttatta

SEQ ID NO: 30063 - DNA, 25 bp, synthetic construct
  misc_feature 1..25: note = Oligonucleotide
  source 1..25: mol_type = other DNA
tcctcaacataataaaggaaattta

SEQ ID NO: 30064 - DNA, 25 bp, synthetic construct
  misc_feature 1..25: note = Oligonucleotide
  source 1..25: mol_type = other DNA
acttcctcaacataataaaggaaat

SEQ ID NO: 30065 - DNA, 25 bp, synthetic construct
  misc_feature 1..25: note = Oligonucleotide
  source 1..25: mol_type = other DNA
gtaacttcctcaacataataaagga

SEQ ID NO: 30066 - DNA, 25 bp, synthetic construct
  misc_feature 1..25: note = Oligonucleotide
  source 1..25: mol_type = other DNA
ctagtaacttcctcaacataataaa

SEQ ID NO: 30067 - DNA, 25 bp, synthetic construct
  misc_feature 1..25: note = Oligonucleotide
  source 1..25: mol_type = other DNA
aagctagtaacttcctcaacataat

SEQ ID NO: 30068 - DNA, 25 bp, synthetic construct
  misc_feature 1..25: note = Oligonucleotide
  source 1..25: mol_type = other DNA
tagaagctagtaacttcctcaacat

SEQ ID NO: 30069 - DNA, 25 bp, synthetic construct
  misc_feature 1..25: note = Oligonucleotide
  source 1..25: mol_type = other DNA
taatagaagctagtaacttcctcaa

SEQ ID NO: 30070 - DNA, 25 bp, synthetic construct
  misc_feature 1..25: note = Oligonucleotide
  source 1..25: mol_type = other DNA
tagtaatagaagctagtaacttcct

SEQ ID NO: 30071 - DNA, 25 bp, synthetic construct
  misc_feature 1..25: note = Oligonucleotide
  source 1..25: mol_type = other DNA
aactagtaatagaagctagtaactt

SEQ ID NO: 30072 - DNA, 25 bp, synthetic construct
  misc_feature 1..25: note = Oligonucleotide
  source 1..25: mol_type = other DNA
ggaaactagtaatagaagctagtaa

SEQ ID NO: 30073 - DNA, 25 bp, synthetic construct
  misc_feature 1..25: note = Oligonucleotide
  source 1..25: mol_type = other DNA
tcaggaaactagtaatagaagctag

SEQ ID NO: 30074 - DNA, 25 bp, synthetic construct
  misc_feature 1..25: note = Oligonucleotide
  source 1..25: mol_type = other DNA
cactcaggaaactagtaatagaagc

SEQ ID NO: 30075 - DNA, 25 bp, synthetic construct
  misc_feature 1..25: note = Oligonucleotide
  source 1..25: mol_type = other DNA
aaacactcaggaaactagtaataga

SEQ ID NO: 30076 - DNA, 25 bp, synthetic construct
  misc_feature 1..25: note = Oligonucleotide
  source 1..25: mol_type = other DNA
taaaaacactcaggaaactagtaat

SEQ ID NO: 30077 - DNA, 25 bp, synthetic construct
  misc_feature 1..25: note = Oligonucleotide
  source 1..25: mol_type = other DNA
ttataaaaacactcaggaaactagt

SEQ ID NO: 30078 - DNA, 25 bp, synthetic construct
  misc_feature 1..25: note = Oligonucleotide
  source 1..25: mol_type = other DNA
tcattataaaaacactcaggaaact

SEQ ID NO: 30079 - DNA, 25 bp, synthetic construct
  misc_feature 1..25: note = Oligonucleotide
  source 1..25: mol_type = other DNA
ctttcattataaaaacactcaggaa

SEQ ID NO: 30080 - DNA, 25 bp, synthetic construct
  misc_feature 1..25: note = Oligonucleotide
  source 1..25: mol_type = other DNA
actctttcattataaaaacactcag

SEQ ID NO: 30081 - DNA, 25 bp, synthetic construct
  misc_feature 1..25: note = Oligonucleotide
  source 1..25: mol_type = other DNA
aacactctttcattataaaaacact

SEQ ID NO: 30082 - DNA, 25 bp, synthetic construct
  misc_feature 1..25: note = Oligonucleotide
  source 1..25: mol_type = other DNA
tccaacactctttcattataaaaac

SEQ ID NO: 30083 - DNA, 25 bp, synthetic construct
  misc_feature 1..25: note = Oligonucleotide
  source 1..25: mol_type = other DNA
taatccaacactctttcattataaa

SEQ ID NO: 30084 - DNA, 25 bp, synthetic construct
  misc_feature 1..25: note = Oligonucleotide
  source 1..25: mol_type = other DNA
ccataatccaacactctttcattat

SEQ ID NO: 30085 - DNA, 25 bp, synthetic construct
  misc_feature 1..25: note = Oligonucleotide
  source 1..25: mol_type = other DNA
ctgccataatccaacactctttcat

SEQ ID NO: 30086 - DNA, 25 bp, synthetic construct
  misc_feature 1..25: note = Oligonucleotide
  source 1..25: mol_type = other DNA
catctgccataatccaacactcttt

SEQ ID NO: 30087 - DNA, 25 bp, synthetic construct
  misc_feature 1..25: note = Oligonucleotide
  source 1..25: mol_type = other DNA
aagcatctgccataatccaacactc

SEQ ID NO: 30088 - DNA, 25 bp, synthetic construct
  misc_feature 1..25: note = Oligonucleotide
  source 1..25: mol_type = other DNA
aaaaagcatctgccataatccaaca

SEQ ID NO: 30089 - DNA, 25 bp, synthetic construct
  misc_feature 1..25: note = Oligonucleotide
  source 1..25: mol_type = other DNA
cataaaaagcatctgccataatcca

SEQ ID NO: 30090 - DNA, 25 bp, synthetic construct
  misc_feature 1..25: note = Oligonucleotide
  source 1..25: mol_type = other DNA
atgcataaaaagcatctgccataat

SEQ ID NO: 30091 - DNA, 25 bp, synthetic construct
  misc_feature 1..25: note = Oligonucleotide
  source 1..25: mol_type = other DNA
ttgatgcataaaaagcatctgccat

SEQ ID NO: 30092 - DNA, 25 bp, synthetic construct
  misc_feature 1..25: note = Oligonucleotide
  source 1..25: mol_type = other DNA
caattgatgcataaaaagcatctgc

SEQ ID NO: 30093 - DNA, 25 bp, synthetic construct
  misc_feature 1..25: note = Oligonucleotide
  source 1..25: mol_type = other DNA
tttcaattgatgcataaaaagcatc

SEQ ID NO: 30094 - DNA, 25 bp, synthetic construct
  misc_feature 1..25: note = Oligonucleotide
  source 1..25: mol_type = other DNA
tcatttcaattgatgcataaaaagc

SEQ ID NO: 30095 - DNA, 25 bp, synthetic construct
  misc_feature 1..25: note = Oligonucleotide
  source 1..25: mol_type = other DNA
tgatcatttcaattgatgcataaaa

SEQ ID NO: 30096 - DNA, 25 bp, synthetic construct
  misc_feature 1..25: note = Oligonucleotide
  source 1..25: mol_type = other DNA
aaatgatcatttcaattgatgcata

SEQ ID NO: 30097 - DNA, 25 bp, synthetic construct
  misc_feature 1..25: note = Oligonucleotide
  source 1..25: mol_type = other DNA
gaaaaatgatcatttcaattgatgc

SEQ ID NO: 30098 - DNA, 25 bp, synthetic construct
  misc_feature 1..25: note = Oligonucleotide
  source 1..25: mol_type = other DNA
ggggaaaaatgatcatttcaattga

SEQ ID NO: 30099 - DNA, 25 bp, synthetic construct
  misc_feature 1..25: note = Oligonucleotide
  source 1..25: mol_type = other DNA
aagggggaaaaatgatcatttcaat

SEQ ID NO: 30100 - DNA, 25 bp, synthetic construct
  misc_feature 1..25: note = Oligonucleotide
  source 1..25: mol_type = other DNA
acaaagggggaaaaatgatcatttc

SEQ ID NO: 30101 - DNA, 25 bp, synthetic construct
  misc_feature 1..25: note = Oligonucleotide
  source 1..25: mol_type = other DNA
agaacaaagggggaaaaatgatcat

SEQ ID NO: 30102 - DNA, 25 bp, synthetic construct
  misc_feature 1..25: note = Oligonucleotide
  source 1..25: mol_type = other DNA
aatagaacaaagggggaaaaatgat

SEQ ID NO: 30103 - DNA, 25 bp, synthetic construct
  misc_feature 1..25: note = Oligonucleotide
  source 1..25: mol_type = other DNA
attaatagaacaaagggggaaaaat

SEQ ID NO: 30104 - DNA, 25 bp, synthetic construct
  misc_feature 1..25: note = Oligonucleotide
  source 1..25: mol_type = other DNA
cacattaatagaacaaagggggaaa

SEQ ID NO: 30105 - DNA, 25 bp, synthetic construct
  misc_feature 1..25: note = Oligonucleotide
  source 1..25: mol_type = other DNA
catcacattaatagaacaaaggggg

SEQ ID NO: 30106 - DNA, 25 bp, synthetic construct
  misc_feature 1..25: note = Oligonucleotide
  source 1..25: mol_type = other DNA
atacatcacattaatagaacaaagg

SEQ ID NO: 30107 - DNA, 25 bp, synthetic construct
  misc_feature 1..25: note = Oligonucleotide
  source 1..25: mol_type = other DNA
ataatacatcacattaatagaacaa

SEQ ID NO: 30108 - DNA, 25 bp, synthetic construct
  misc_feature 1..25: note = Oligonucleotide
  source 1..25: mol_type = other DNA
aatataatacatcacattaatagaa

SEQ ID NO: 30109 - DNA, 25 bp, synthetic construct
  misc_feature 1..25: note = Oligonucleotide
  source 1..25: mol_type = other DNA
atcaatataatacatcacattaata

SEQ ID NO: 30110 - DNA, 25 bp, synthetic construct
  misc_feature 1..25: note = Oligonucleotide
  source 1..25: mol_type = other DNA
gtaatcaatataatacatcacatta

SEQ ID NO: 30111 - DNA, 25 bp, synthetic construct
  misc_feature 1..25: note = Oligonucleotide
  source 1..25: mol_type = other DNA
aatgtaatcaatataatacatcaca

SEQ ID NO: 30112 - DNA, 25 bp, synthetic construct
  misc_feature 1..25: note = Oligonucleotide
  source 1..25: mol_type = other DNA
actaatgtaatcaatataatacatc

SEQ ID NO: 30113 - DNA, 25 bp, synthetic construct
  misc_feature 1..25: note = Oligonucleotide
  source 1..25: mol_type = other DNA
cagactaatgtaatcaatataatac

SEQ ID NO: 30114 - DNA, 25 bp, synthetic construct
  misc_feature 1..25: note = Oligonucleotide
  source 1..25: mol_type = other DNA
ctacagactaatgtaatcaatataa

SEQ ID NO: 30115 - DNA, 25 bp, synthetic construct
  misc_feature 1..25: note = Oligonucleotide
  source 1..25: mol_type = other DNA
aatctacagactaatgtaatcaata

SEQ ID NO: 30116 - DNA, 25 bp, synthetic construct
  misc_feature 1..25: note = Oligonucleotide
  source 1..25: mol_type = other DNA
agaaatctacagactaatgtaatca

SEQ ID NO: 30117 - DNA, 25 bp, synthetic construct
  misc_feature 1..25: note = Oligonucleotide
  source 1..25: mol_type = other DNA
aaaagaaatctacagactaatgtaa

SEQ ID NO: 30118 - DNA, 25 bp, synthetic construct
  misc_feature 1..25: note = Oligonucleotide
  source 1..25: mol_type = other DNA
aggaaaagaaatctacagactaatg

SEQ ID NO: 30119 - DNA, 25 bp, synthetic construct
  misc_feature 1..25: note = Oligonucleotide
  source 1..25: mol_type = other DNA
tgcaggaaaagaaatctacagacta

SEQ ID NO: 30120 - DNA, 25 bp, synthetic construct
  misc_feature 1..25: note = Oligonucleotide
  source 1..25: mol_type = other DNA
cattgcaggaaaagaaatctacaga

SEQ ID NO: 30121 - DNA, 25 bp, synthetic construct
  misc_feature 1..25: note = Oligonucleotide
  source 1..25: mol_type = other DNA
gggcattgcaggaaaagaaatctac

SEQ ID NO: 30122 - DNA, 25 bp, synthetic construct
  misc_feature 1..25: note = Oligonucleotide
  source 1..25: mol_type = other DNA
taagggcattgcaggaaaagaaatc

SEQ ID NO: 30123 - DNA, 25 bp, synthetic construct
  misc_feature 1..25: note = Oligonucleotide
  source 1..25: mol_type = other DNA
agataagggcattgcaggaaaagaa

SEQ ID NO: 30124 - DNA, 25 bp, synthetic construct
  misc_feature 1..25: note = Oligonucleotide
  source 1..25: mol_type = other DNA
gccagataagggcattgcaggaaaa

SEQ ID NO: 30125 - DNA, 25 bp, synthetic construct
  misc_feature 1..25: note = Oligonucleotide
  source 1..25: mol_type = other DNA
aaagccagataagggcattgcagga

SEQ ID NO: 30126 - DNA, 25 bp, synthetic construct
  misc_feature 1..25: note = Oligonucleotide
  source 1..25: mol_type = other DNA
accaaagccagataagggcattgca

SEQ ID NO: 30127 - DNA, 25 bp, synthetic construct
  misc_feature 1..25: note = Oligonucleotide
  source 1..25: mol_type = other DNA
gctaccaaagccagataagggcatt

SEQ ID NO: 30128 - DNA, 25 bp, synthetic construct
  misc_feature 1..25: note = Oligonucleotide
  source 1..25: mol_type = other DNA
cctgctaccaaagccagataagggc

SEQ ID NO: 30129 - DNA, 25 bp, synthetic construct
  misc_feature 1..25: note = Oligonucleotide
  source 1..25: mol_type = other DNA
taccctgctaccaaagccagataag

SEQ ID NO: 30130 - DNA, 25 bp, synthetic construct
  misc_feature 1..25: note = Oligonucleotide
  source 1..25: mol_type = other DNA
tattaccctgctaccaaagccagat

SEQ ID NO: 30131 - DNA, 25 bp, synthetic construct
  misc_feature 1..25: note = Oligonucleotide
  source 1..25: mol_type = other DNA
cagtattaccctgctaccaaagcca

SEQ ID NO: 30132 - DNA, 25 bp, synthetic construct
  misc_feature 1..25: note = Oligonucleotide
  source 1..25: mol_type = other DNA
ggccagtattaccctgctaccaaag

SEQ ID NO: 30133 - DNA, 25 bp, synthetic construct
  misc_feature 1..25: note = Oligonucleotide
  source 1..25: mol_type = other DNA
cgaggccagtattaccctgctacca

SEQ ID NO: 30134 - DNA, 25 bp, synthetic construct
  misc_feature 1..25: note = Oligonucleotide
  source 1..25: mol_type = other DNA
tcacgaggccagtattaccctgcta

SEQ ID NO: 30135 - DNA, 25 bp, synthetic construct
  misc_feature 1..25: note = Oligonucleotide
  source 1..25: mol_type = other DNA
atttcacgaggccagtattaccctg

SEQ ID NO: 30136 - DNA, 25 bp, synthetic construct
  misc_feature 1..25: note = Oligonucleotide
  source 1..25: mol_type = other DNA
ctcatttcacgaggccagtattacc

SEQ ID NO: 30137 - DNA, 25 bp, synthetic construct
  misc_feature 1..25: note = Oligonucleotide
  source 1..25: mol_type = other DNA
tccctcatttcacgaggccagtatt

SEQ ID NO: 30138 - DNA, 25 bp, synthetic construct
  misc_feature 1..25: note = Oligonucleotide
  source 1..25: mol_type = other DNA
cactccctcatttcacgaggccagt

SEQ ID NO: 30139 - DNA, 25 bp, synthetic construct
  misc_feature 1..25: note = Oligonucleotide
  source 1..25: mol_type = other DNA
gaacactccctcatttcacgaggcc

SEQ ID NO: 30140 - DNA, 25 bp, synthetic construct
  misc_feature 1..25: note = Oligonucleotide
  source 1..25: mol_type = other DNA
agggaacactccctcatttcacgag

SEQ ID NO: 30141 - DNA, 25 bp, synthetic construct
  misc_feature 1..25: note = Oligonucleotide
  source 1..25: mol_type = other DNA
aggagggaacactccctcatttcac

SEQ ID NO: 30142 - DNA, 25 bp, synthetic construct
  misc_feature 1..25: note = Oligonucleotide
  source 1..25: mol_type = other DNA
aagaggagggaacactccctcattt

SEQ ID NO: 30143 - DNA, 25 bp, synthetic construct
  misc_feature 1..25: note = Oligonucleotide
  source 1..25: mol_type = other DNA
cagaagaggagggaacactccctca

SEQ ID NO: 30144 - DNA, 25 bp, synthetic construct
  misc_feature 1..25: note = Oligonucleotide
  source 1..25: mol_type = other DNA
aaacagaagaggagggaacactccc

SEQ ID NO: 30145 - DNA, 25 bp, synthetic construct
  misc_feature 1..25: note = Oligonucleotide
  source 1..25: mol_type = other DNA
aaaaaacagaagaggagggaacact

SEQ ID NO: 30146 - DNA, 25 bp, synthetic construct
  misc_feature 1..25: note = Oligonucleotide
  source 1..25: mol_type = other DNA
tccaaaaaacagaagaggagggaac

SEQ ID NO: 30147 - DNA, 25 bp, synthetic construct
  misc_feature 1..25: note = Oligonucleotide
  source 1..25: mol_type = other DNA
tcttccaaaaaacagaagaggaggg

SEQ ID NO: 30148 - DNA, 25 bp, synthetic construct
  misc_feature 1..25: note = Oligonucleotide
  source 1..25: mol_type = other DNA
aactcttccaaaaaacagaagagga

SEQ ID NO: 30149 - DNA, 25 bp, synthetic construct
  misc_feature 1..25: note = Oligonucleotide
  source 1..25: mol_type = other DNA
tcaaactcttccaaaaaacagaaga

SEQ ID NO: 30150 - DNA, 25 bp, synthetic construct
  misc_feature 1..25: note = Oligonucleotide
  source 1..25: mol_type = other DNA
ttctcaaactcttccaaaaaacaga

SEQ ID NO: 30151 - DNA, 25 bp, synthetic construct
  misc_feature 1..25: note = Oligonucleotide
  source 1..25: mol_type = other DNA
aaattctcaaactcttccaaaaaac

SEQ ID NO: 30152 - DNA, 25 bp, synthetic construct
  misc_feature 1..25: note = Oligonucleotide
  source 1..25: mol_type = other DNA
cacaaattctcaaactcttccaaaa

SEQ ID NO: 30153 - DNA, 25 bp, synthetic construct
  misc_feature 1..25: note = Oligonucleotide
  source 1..25: mol_type = other DNA
tgacacaaattctcaaactcttcca

SEQ ID NO: 30154 - DNA, 25 bp, synthetic construct
  misc_feature 1..25: note = Oligonucleotide
  source 1..25: mol_type = other DNA
aattgacacaaattctcaaactctt

SEQ ID NO: 30155 - DNA, 25 bp, synthetic construct
  misc_feature 1..25: note = Oligonucleotide
  source 1..25: mol_type = other DNA
aagaattgacacaaattctcaaact

SEQ ID NO: 30156 - DNA, 25 bp, synthetic construct
  misc_feature 1..25: note = Oligonucleotide
  source 1..25: mol_type = other DNA
ttaaagaattgacacaaattctcaa

SEQ ID NO: 30157 - DNA, 25 bp, synthetic construct
  misc_feature 1..25: note = Oligonucleotide
  source 1..25: mol_type = other DNA
aatttaaagaattgacacaaattct

SEQ ID NO: 30158 - DNA, 25 bp, synthetic construct
  misc_feature 1..25: note = Oligonucleotide
  source 1..25: mol_type = other DNA
agaaatttaaagaattgacacaaat

SEQ ID NO: 30159 - DNA, 25 bp, synthetic construct
  misc_feature 1..25: note = Oligonucleotide
  source 1..25: mol_type = other DNA
actagaaatttaaagaattgacaca

SEQ ID NO: 30160 - DNA, 25 bp, synthetic construct
  misc_feature 1..25: note = Oligonucleotide
  source 1..25: mol_type = other DNA
tctactagaaatttaaagaattgac

SEQ ID NO: 30161 - DNA, 25 bp, synthetic construct
  misc_feature 1..25: note = Oligonucleotide
  source 1..25: mol_type = other DNA
cactctactagaaatttaaagaatt

SEQ ID NO: 30162 - DNA, 25 bp, synthetic construct
  misc_feature 1..25: note = Oligonucleotide
  source 1..25: mol_type = other DNA
gtgcactctactagaaatttaaaga

SEQ ID NO: 30163 - DNA, 25 bp, synthetic construct
  misc_feature 1..25: note = Oligonucleotide
  source 1..25: mol_type = other DNA
ctggtgcactctactagaaatttaa

SEQ ID NO: 30164 - DNA, 25 bp, synthetic construct
  misc_feature 1..25: note = Oligonucleotide
  source 1..25: mol_type = other DNA
tcactggtgcactctactagaaatt

SEQ ID NO: 30165 - DNA, 25 bp, synthetic construct
  misc_feature 1..25: note = Oligonucleotide
  source 1..25: mol_type = other DNA
gcatcactggtgcactctactagaa

SEQ ID NO: 30166 - DNA, 25 bp, synthetic construct
  misc_feature 1..25: note = Oligonucleotide
  source 1..25: mol_type = other DNA
atggcatcactggtgcactctacta

SEQ ID NO: 30167 - DNA, 25 bp, synthetic construct
  misc_feature 1..25: note = Oligonucleotide
  source 1..25: mol_type = other DNA
cagatggcatcactggtgcactcta

SEQ ID NO: 30168 - DNA, 25 bp, synthetic construct
  misc_feature 1..25: note = Oligonucleotide
  source 1..25: mol_type = other DNA
caccagatggcatcactggtgcact

SEQ ID NO: 30169 - DNA, 25 bp, synthetic construct
  misc_feature 1..25: note = Oligonucleotide
  source 1..25: mol_type = other DNA
caccaccagatggcatcactggtgc

SEQ ID NO: 30170 - DNA, 25 bp, synthetic construct
  misc_feature 1..25: note = Oligonucleotide
  source 1..25: mol_type = other DNA
gtccaccaccagatggcatcactgg

SEQ ID NO: 30171 - DNA, 25 bp, synthetic construct
  misc_feature 1..25: note = Oligonucleotide
  source 1..25: mol_type = other DNA
aaagtccaccaccagatggcatcac

SEQ ID NO: 30172 - DNA, 25 bp, synthetic construct
  misc_feature 1..25: note = Oligonucleotide
  source 1..25: mol_type = other DNA
agaaaagtccaccaccagatggcat

SEQ ID NO: 30173 - DNA, 25 bp, synthetic construct
  misc_feature 1..25: note = Oligonucleotide
  source 1..25: mol_type = other DNA
cgaagaaaagtccaccaccagatgg

SEQ ID NO: 30174 - DNA, 25 bp, synthetic construct
  misc_feature 1..25: note = Oligonucleotide
  source 1..25: mol_type = other DNA
caacgaagaaaagtccaccaccaga

SEQ ID NO: 30175 - DNA, 25 bp, synthetic construct
  misc_feature 1..25: note = Oligonucleotide
  source 1..25: mol_type = other DNA
tcccaacgaagaaaagtccaccacc

SEQ ID NO: 30176 - DNA, 25 bp, synthetic construct
  misc_feature 1..25: note = Oligonucleotide
  source 1..25: mol_type = other DNA
gcctcccaacgaagaaaagtccacc

SEQ ID NO: 30177 - DNA, 25 bp, synthetic construct
  misc_feature 1..25: note = Oligonucleotide
  source 1..25: mol_type = other DNA
caagcctcccaacgaagaaaagtcc

SEQ ID NO: 30178 - DNA, 25 bp, synthetic construct
  misc_feature 1..25: note = Oligonucleotide
  source 1..25: mol_type = other DNA
ccacaagcctcccaacgaagaaaag

SEQ ID NO: 30179 - DNA, 25 bp, synthetic construct
  misc_feature 1..25: note = Oligonucleotide
  source 1..25: mol_type = other DNA
taaccacaagcctcccaacgaagaa

SEQ ID NO: 30180 - DNA, 25 bp, synthetic construct
  misc_feature 1..25: note = Oligonucleotide
  source 1..25: mol_type = other DNA
ccttaaccacaagcctcccaacgaa

SEQ ID NO: 30181 - DNA, 25 bp, synthetic construct
  misc_feature 1..25: note = Oligonucleotide
  source 1..25: mol_type = other DNA
aatccttaaccacaagcctcccaac

SEQ ID NO: 30182 - DNA, 25 bp, synthetic construct
  misc_feature 1..25: note = Oligonucleotide
  source 1..25: mol_type = other DNA
ttgaatccttaaccacaagcctccc

SEQ ID NO: 30183 - DNA, 25 bp, synthetic construct
  misc_feature 1..25: note = Oligonucleotide
  source 1..25: mol_type = other DNA
agattgaatccttaaccacaagcct

SEQ ID NO: 30184 - DNA, 25 bp, synthetic construct
  misc_feature 1..25: note = Oligonucleotide
  source 1..25: mol_type = other DNA
aagagattgaatccttaaccacaag

SEQ ID NO: 30185 - DNA, 25 bp, synthetic construct
  misc_feature 1..25: note = Oligonucleotide
  source 1..25: mol_type = other DNA
gcaaagagattgaatccttaaccac

SEQ ID NO: 30186 - DNA, 25 bp, synthetic construct
  misc_feature 1..25: note = Oligonucleotide
  source 1..25: mol_type = other DNA
caagcaaagagattgaatccttaac

SEQ ID NO: 30187 - DNA, 25 bp, synthetic construct
  misc_feature 1..25: note = Oligonucleotide
  source 1..25: mol_type = other DNA
taacaagcaaagagattgaatcctt

SEQ ID NO: 30188 - DNA, 25 bp, synthetic construct
  misc_feature 1..25: note = Oligonucleotide
  source 1..25: mol_type = other DNA
ctataacaagcaaagagattgaatc

SEQ ID NO: 30189 - DNA, 25 bp, synthetic construct
  misc_feature 1..25: note = Oligonucleotide
  source 1..25: mol_type = other DNA
gacctataacaagcaaagagattga

SEQ ID NO: 30190 - DNA, 25 bp, synthetic construct
  misc_feature 1..25: note = Oligonucleotide
  source 1..25: mol_type = other DNA
acagacctataacaagcaaagagat

SEQ ID NO: 30191 - DNA, 25 bp, synthetic construct
  misc_feature 1..25: note = Oligonucleotide
  source 1..25: mol_type = other DNA
taaacagacctataacaagcaaaga

SEQ ID NO: 30192 - DNA, 25 bp, synthetic construct
  misc_feature 1..25: note = Oligonucleotide
  source 1..25: mol_type = other DNA
atttaaacagacctataacaagcaa

SEQ ID NO: 30193 - DNA, 25 bp, synthetic construct
  misc_feature 1..25: note = Oligonucleotide
  source 1..25: mol_type = other DNA
aaaatttaaacagacctataacaag

SEQ ID NO: 30194 - DNA, 25 bp, synthetic construct
  misc_feature 1..25: note = Oligonucleotide
  source 1..25: mol_type = other DNA
cagaaaatttaaacagacctataac

SEQ ID NO: 30195 - DNA, 25 bp, synthetic construct
  misc_feature 1..25: note = Oligonucleotide
  source 1..25: mol_type = other DNA
aaacagaaaatttaaacagacctat

SEQ ID NO: 30196 - DNA, 25 bp, synthetic construct
  misc_feature 1..25: note = Oligonucleotide
  source 1..25: mol_type = other DNA
aagaaacagaaaatttaaacagacc

SEQ ID NO: 30197 - DNA, 25 bp, synthetic construct
  misc_feature 1..25: note = Oligonucleotide
  source 1..25: mol_type = other DNA
aagaagaaacagaaaatttaaacag

SEQ ID NO: 30198 - DNA, 25 bp, synthetic construct
  misc_feature 1..25: note = Oligonucleotide
  source 1..25: mol_type = other DNA
ctcaagaagaaacagaaaatttaaa

SEQ ID NO: 30199 - DNA, 25 bp, synthetic construct
  misc_feature 1..25: note = Oligonucleotide
  source 1..25: mol_type = other DNA
tgactcaagaagaaacagaaaattt

SEQ ID NO: 30200 - DNA, 25 bp, synthetic construct
  misc_feature 1..25: note = Oligonucleotide
  source 1..25: mol_type = other DNA
aactgactcaagaagaaacagaaaa

SEQ ID NO: 30201 - DNA, 25 bp, synthetic construct
  misc_feature 1..25: note = Oligonucleotide
  source 1..25: mol_type = other DNA
caaaactgactcaagaagaaacaga

SEQ ID NO: 30202 - DNA, 25 bp, synthetic construct
  misc_feature 1..25: note = Oligonucleotide
  source 1..25: mol_type = other DNA
taccaaaactgactcaagaagaaac

SEQ ID NO: 30203 - DNA, 25 bp, synthetic construct
  misc_feature 1..25: note = Oligonucleotide
  source 1..25: mol_type = other DNA
aattaccaaaactgactcaagaaga

SEQ ID NO: 30204 - DNA, 25 bp, synthetic construct
  misc_feature 1..25: note = Oligonucleotide
  source 1..25: mol_type = other DNA
acaaattaccaaaactgactcaaga

SEQ ID NO: 30205 - DNA, 25 bp, synthetic construct
  misc_feature 1..25: note = Oligonucleotide
  source 1..25: mol_type = other DNA
aacacaaattaccaaaactgactca

SEQ ID NO: 30206 - DNA, 25 bp, synthetic construct
  misc_feature 1..25: note = Oligonucleotide
  source 1..25: mol_type = other DNA
aaaaacacaaattaccaaaactgac

SEQ ID NO: 30207 - DNA, 25 bp, synthetic construct
  misc_feature 1..25: note = Oligonucleotide
  source 1..25: mol_type = other DNA
tagaaaaacacaaattaccaaaact

SEQ ID NO: 30208 - DNA, 25 bp, synthetic construct
  misc_feature 1..25: note = Oligonucleotide
  source 1..25: mol_type = other DNA
ttctagaaaaacacaaattaccaaa

SEQ ID NO: 30209 - DNA, 25 bp, synthetic construct
  misc_feature 1..25: note = Oligonucleotide
  source 1..25: mol_type = other DNA
aatttctagaaaaacacaaattacc

SEQ ID NO: 30210 - DNA, 25 bp, synthetic construct
  misc_feature 1..25: note = Oligonucleotide
  source 1..25: mol_type = other DNA
acaaatttctagaaaaacacaaatt

SEQ ID NO: 30211 - DNA, 25 bp, synthetic construct
  misc_feature 1..25: note = Oligonucleotide
  source 1..25: mol_type = other DNA
tagacaaatttctagaaaaacacaa

SEQ ID NO: 30212 - DNA, 25 bp, synthetic construct
  misc_feature 1..25: note = Oligonucleotide
  source 1..25: mol_type = other DNA
aggtagacaaatttctagaaaaaca

SEQ ID NO: 30213 - DNA, 25 bp, synthetic construct
  misc_feature 1..25: note = Oligonucleotide
  source 1..25: mol_type = other DNA
atgaggtagacaaatttctagaaaa

SEQ ID NO: 30214 - DNA, 25 bp, synthetic construct
  misc_feature 1..25: note = Oligonucleotide
  source 1..25: mol_type = other DNA
tagatgaggtagacaaatttctaga

SEQ ID NO: 30215 - DNA, 25 bp, synthetic construct
  misc_feature 1..25: note = Oligonucleotide
  source 1..25: mol_type = other DNA
agctagatgaggtagacaaatttct

SEQ ID NO: 30216 - DNA, 25 bp, synthetic construct
  misc_feature 1..25: note = Oligonucleotide
  source 1..25: mol_type = other DNA
aaaagctagatgaggtagacaaatt

SEQ ID NO: 30217 - DNA, 25 bp, synthetic construct
  misc_feature 1..25: note = Oligonucleotide
  source 1..25: mol_type = other DNA
tagaaaagctagatgaggtagacaa

SEQ ID NO: 30218 - DNA, 25 bp, synthetic construct
  misc_feature 1..25: note = Oligonucleotide
  source 1..25: mol_type = other DNA
aaatagaaaagctagatgaggtaga

SEQ ID NO: 30219 - DNA, 25 bp, synthetic construct
  misc_feature 1..25: note = Oligonucleotide
  source 1..25: mol_type = other DNA
aacaaatagaaaagctagatgaggt

SEQ ID NO: 30220 - DNA, 25 bp, synthetic construct
  misc_feature 1..25: note = Oligonucleotide
  source 1..25: mol_type = other DNA
gccaacaaatagaaaagctagatga

SEQ ID NO: 30221 - DNA, 25 bp, synthetic construct
  misc_feature 1..25: note = Oligonucleotide
  source 1..25: mol_type = other DNA
catgccaacaaatagaaaagctaga

SEQ ID NO: 30222 - DNA, 25 bp, synthetic construct
  misc_feature 1..25: note = Oligonucleotide
  source 1..25: mol_type = other DNA
ttacatgccaacaaatagaaaagct

SEQ ID NO: 30223 - DNA, 25 bp, synthetic construct
  misc_feature 1..25: note = Oligonucleotide
  source 1..25: mol_type = other DNA
caattacatgccaacaaatagaaaa

SEQ ID NO: 30224 - DNA, 25 bp, synthetic construct
  misc_feature 1..25: note = Oligonucleotide
  source 1..25: mol_type = other DNA
gaacaattacatgccaacaaataga

SEQ ID NO: 30225 - DNA, 25 bp, synthetic construct
  misc_feature 1..25: note = Oligonucleotide
  source 1..25: mol_type = other DNA
tatgaacaattacatgccaacaaat

SEQ ID NO: 30226 - DNA, 25 bp, synthetic construct
  misc_feature 1..25: note = Oligonucleotide
  source 1..25: mol_type = other DNA
cactatgaacaattacatgccaaca

SEQ ID NO: 30227 - DNA, 25 bp, synthetic construct
  misc_feature 1..25: note = Oligonucleotide
  source 1..25: mol_type = other DNA
taacactatgaacaattacatgcca

SEQ ID NO: 30228 - DNA, 25 bp, synthetic construct
  misc_feature 1..25: note = Oligonucleotide
  source 1..25: mol_type = other DNA
atataacactatgaacaattacatg

SEQ ID NO: 30229 - DNA, 25 bp, synthetic construct
  misc_feature 1..25: note = Oligonucleotide
  source 1..25: mol_type = other DNA
ggaatataacactatgaacaattac

SEQ ID NO: 30230 - DNA, 25 bp, synthetic construct
  misc_feature 1..25: note = Oligonucleotide
  source 1..25: mol_type = other DNA
aaaggaatataacactatgaacaat

SEQ ID NO: 30231 - DNA, 25 bp, synthetic construct
  misc_feature 1..25: note = Oligonucleotide
  source 1..25: mol_type = other DNA
taaaaaggaatataacactatgaac

SEQ ID NO: 30232 - DNA, 25 bp, synthetic construct
  misc_feature 1..25: note = Oligonucleotide
  source 1..25: mol_type = other DNA
agttaaaaaggaatataacactatg

SEQ ID NO: 30233 - DNA, 25 bp, synthetic construct
  misc_feature 1..25: note = Oligonucleotide
  source 1..25: mol_type = other DNA
agaagttaaaaaggaatataacact

SEQ ID NO: 30234 - DNA, 25 bp, synthetic construct
  misc_feature 1..25: note = Oligonucleotide
  source 1..25: mol_type = other DNA
tacagaagttaaaaaggaatataac

SEQ ID NO: 30235 - DNA, 25 bp, synthetic construct
  misc_feature 1..25: note = Oligonucleotide
  source 1..25: mol_type = other DNA
tgttacagaagttaaaaaggaatat

SEQ ID NO: 30236 - DNA, 25 bp, synthetic construct
  misc_feature 1..25: note = Oligonucleotide
  source 1..25: mol_type = other DNA
cagtgttacagaagttaaaaaggaa

SEQ ID NO: 30237 - DNA, 25 bp, synthetic construct
  misc_feature 1..25: note = Oligonucleotide
  source 1..25: mol_type = other DNA
tatcagtgttacagaagttaaaaag

SEQ ID NO: 30238 - DNA, 25 bp, synthetic construct
  misc_feature 1..25: note = Oligonucleotide
  source 1..25: mol_type = other DNA
tactatcagtgttacagaagttaaa

SEQ ID NO: 30239 - DNA, 25 bp, synthetic construct
  misc_feature 1..25: note = Oligonucleotide
  source 1..25: mol_type = other DNA
acttactatcagtgttacagaagtt

SEQ ID NO: 30240 - DNA, 25 bp, synthetic construct
  misc_feature 1..25: note = Oligonucleotide
  source 1..25: mol_type = other DNA
gggacttactatcagtgttacagaa

SEQ ID NO: 30241 - DNA, 25 bp, synthetic construct
  misc_feature 1..25: note = Oligonucleotide
  source 1..25: mol_type = other DNA
ttggggacttactatcagtgttaca

SEQ ID NO: 30242 - DNA, 25 bp, synthetic construct
  misc_feature 1..25: note = Oligonucleotide
  source 1..25: mol_type = other DNA
aatttggggacttactatcagtgtt

SEQ ID NO: 30243 - DNA, 25 bp, synthetic construct
  misc_feature 1..25: note = Oligonucleotide
  source 1..25: mol_type = other DNA
tgaaatttggggacttactatcagt

SEQ ID NO: 30244 - DNA, 25 bp, synthetic construct
  misc_feature 1..25: note = Oligonucleotide
  source 1..25: mol_type = other DNA
aaatgaaatttggggacttactatc

SEQ ID NO: 30245 - DNA, 25 bp, synthetic construct
  misc_feature 1..25: note = Oligonucleotide
  source 1..25: mol_type = other DNA
cacaaatgaaatttggggacttact

SEQ ID NO: 30246 - DNA, 25 bp, synthetic construct
  misc_feature 1..25: note = Oligonucleotide
  source 1..25: mol_type = other DNA
aatcacaaatgaaatttggggactt

SEQ ID NO: 30247 - DNA, 25 bp, synthetic construct
  misc_feature 1..25: note = Oligonucleotide
  source 1..25: mol_type = other DNA
taaaatcacaaatgaaatttgggga

SEQ ID NO: 30248 - DNA, 25 bp, synthetic construct
  misc_feature 1..25: note = Oligonucleotide
  source 1..25: mol_type = other DNA
aactaaaatcacaaatgaaatttgg

SEQ ID NO: 30249 - DNA, 25 bp, synthetic construct
  misc_feature 1..25: note = Oligonucleotide
  source 1..25: mol_type = other DNA
aataactaaaatcacaaatgaaatt

SEQ ID NO: 30250 - DNA, 25 bp, synthetic construct
  misc_feature 1..25: note = Oligonucleotide
  source 1..25: mol_type = other DNA
agaaataactaaaatcacaaatgaa

SEQ ID NO: 30251 - DNA, 25 bp, synthetic construct
  misc_feature 1..25: note = Oligonucleotide
  source 1..25: mol_type = other DNA
gacagaaataactaaaatcacaaat

SEQ ID NO: 30252 - DNA, 25 bp, synthetic construct
  misc_feature 1..25: note = Oligonucleotide
  source 1..25: mol_type = other DNA
atggacagaaataactaaaatcaca

SEQ ID NO: 30253 - DNA, 25 bp, synthetic construct
  misc_feature 1..25: note = Oligonucleotide
  source 1..25: mol_type = other DNA
aagatggacagaaataactaaaatc

SEQ ID NO: 30254 - DNA, 25 bp, synthetic construct
  misc_feature 1..25: note = Oligonucleotide
  source 1..25: mol_type = other DNA
gagaagatggacagaaataactaaa

SEQ ID NO: 30255 - DNA, 25 bp, synthetic construct
  misc_feature 1..25: note = Oligonucleotide
  source 1..25: mol_type = other DNA
ggagagaagatggacagaaataact

SEQ ID NO: 30256 - DNA, 25 bp, synthetic construct
  misc_feature 1..25: note = Oligonucleotide
  source 1..25: mol_type = other DNA
taaggagagaagatggacagaaata

SEQ ID NO: 30257 - DNA, 25 bp, synthetic construct
  misc_feature 1..25: note = Oligonucleotide
  source 1..25: mol_type = other DNA
tagtaaggagagaagatggacagaa

SEQ ID NO: 30258 - DNA, 25 bp, synthetic construct
  misc_feature 1..25: note = Oligonucleotide
  source 1..25: mol_type = other DNA
gactagtaaggagagaagatggaca

SEQ ID NO: 30259 - DNA, 25 bp, synthetic construct
  misc_feature 1..25: note = Oligonucleotide
  source 1..25: mol_type = other DNA
attgactagtaaggagagaagatgg

SEQ ID NO: 30260 - DNA, 25 bp, synthetic construct
  misc_feature 1..25: note = Oligonucleotide
  source 1..25: mol_type = other DNA
tagattgactagtaaggagagaaga

SEQ ID NO: 30261 - DNA, 25 bp, synthetic construct
  misc_feature 1..25: note = Oligonucleotide
  source 1..25: mol_type = other DNA
ggctagattgactagtaaggagaga

SEQ ID NO: 30262 - DNA, 25 bp, synthetic construct
  misc_feature 1..25: note = Oligonucleotide
  source 1..25: mol_type = other DNA
tttggctagattgactagtaaggag

SEQ ID NO: 30263 - DNA, 25 bp, synthetic construct
  misc_feature 1..25: note = Oligonucleotide
  source 1..25: mol_type = other DNA
acctttggctagattgactagtaag

SEQ ID NO: 30264 - DNA, 25 bp, synthetic construct
  misc_feature 1..25: note = Oligonucleotide
  source 1..25: mol_type = other DNA
caaacctttggctagattgactagt

SEQ ID NO: 30265 - DNA, 25 bp, synthetic construct
  misc_feature 1..25: note = Oligonucleotide
  source 1..25: mol_type = other DNA
tgacaaacctttggctagattgact

SEQ ID NO: 30266 - DNA, 25 bp, synthetic construct
  misc_feature 1..25: note = Oligonucleotide
  source 1..25: mol_type = other DNA
aattgacaaacctttggctagattg

SEQ ID NO: 30267 - DNA, 25 bp, synthetic construct
  misc_feature 1..25: note = Oligonucleotide
  source 1..25: mol_type = other DNA
cataattgacaaacctttggctaga

SEQ ID NO: 30268 - DNA, 25 bp, synthetic construct
  misc_feature 1..25: note = Oligonucleotide
  source 1..25: mol_type = other DNA
caacataattgacaaacctttggct

SEQ ID NO: 30269 - DNA, 25 bp, synthetic construct
  misc_feature 1..25: note = Oligonucleotide
  source 1..25: mol_type = other DNA
tatcaacataattgacaaacctttg

SEQ ID NO: 30270 - DNA, 25 bp, synthetic construct
  misc_feature 1..25: note = Oligonucleotide
  source 1..25: mol_type = other DNA
caatatcaacataattgacaaacct

SEQ ID NO: 30271 - DNA, 25 bp, synthetic construct
  misc_feature 1..25: note = Oligonucleotide
  source 1..25: mol_type = other DNA
tgacaatatcaacataattgacaaa

SEQ ID NO: 30272 - DNA, 25 bp, synthetic construct
  misc_feature 1..25: note = Oligonucleotide
  source 1..25: mol_type = other DNA
ctttgacaatatcaacataattgac

SEQ ID NO: 30273 - DNA, 25 bp, synthetic construct
  misc_feature 1..25: note = Oligonucleotide
  source 1..25: mol_type = other DNA
tttctttgacaatatcaacataatt

SEQ ID NO: 30274 - DNA, 25 bp, synthetic construct
  misc_feature 1..25: note = Oligonucleotide
  source 1..25: mol_type = other DNA
ttgtttctttgacaatatcaacata

SEQ ID NO: 30275 - DNA, 25 bp, synthetic construct
  misc_feature 1..25: note = Oligonucleotide
  source 1..25: mol_type = other DNA
aggttgtttctttgacaatatcaac

SEQ ID NO: 30276 - DNA, 25 bp, synthetic construct
  misc_feature 1..25: note = Oligonucleotide
  source 1..25: mol_type = other DNA
aaaaggttgtttctttgacaatatc

SEQ ID NO: 30277 - DNA, 25 bp, synthetic construct
  misc_feature 1..25: note = Oligonucleotide
  source 1..25: mol_type = other DNA
aataaaaggttgtttctttgacaat

SEQ ID NO: 30278 - DNA, 25 bp, synthetic construct
  misc_feature 1..25: note = Oligonucleotide
  source 1..25: mol_type = other DNA
ggaaataaaaggttgtttctttgac

SEQ ID NO: 30279 - DNA, 25 bp, synthetic construct
  misc_feature 1..25: note = Oligonucleotide
  source 1..25: mol_type = other DNA
caaggaaataaaaggttgtttcttt

SEQ ID NO: 30280 - DNA, 25 bp, synthetic construct
  misc_feature 1..25: note = Oligonucleotide
  source 1..25: mol_type = other DNA
aatcaaggaaataaaaggttgtttc

SEQ ID NO: 30281 - DNA, 25 bp, synthetic construct
  misc_feature 1..25: note = Oligonucleotide
  source 1..25: mol_type = other DNA
gagaatcaaggaaataaaaggttgt

SEQ ID NO: 30282 - DNA, 25 bp, synthetic construct
  misc_feature 1..25: note = Oligonucleotide
  source 1..25: mol_type = other DNA
gcggagaatcaaggaaataaaaggt

SEQ ID NO: 30283 - DNA, 25 bp, synthetic construct
  misc_feature 1..25: note = Oligonucleotide
  source 1..25: mol_type = other DNA
acagcggagaatcaaggaaataaaa

SEQ ID NO: 30284 - DNA, 25 bp, synthetic construct
  misc_feature 1..25: note = Oligonucleotide
  source 1..25: mol_type = other DNA
aaaacagcggagaatcaaggaaata

SEQ ID NO: 30285 - DNA, 25 bp, synthetic construct
  misc_feature 1..25: note = Oligonucleotide
  source 1..25: mol_type = other DNA
agaaaaacagcggagaatcaaggaa

SEQ ID NO: 30286 - DNA, 25 bp, synthetic construct
  misc_feature 1..25: note = Oligonucleotide
  source 1..25: mol_type = other DNA
aagagaaaaacagcggagaatcaag

SEQ ID NO: 30287 - DNA, 25 bp, synthetic construct
  misc_feature 1..25: note = Oligonucleotide
  source 1..25: mol_type = other DNA
caaaagagaaaaacagcggagaatc

SEQ ID NO: 30288 - DNA, 25 bp, synthetic construct
  misc_feature 1..25: note = Oligonucleotide
  source 1..25: mol_type = other DNA
aaacaaaagagaaaaacagcggaga

SEQ ID NO: 30289 - DNA, 25 bp, synthetic construct
  misc_feature 1..25: note = Oligonucleotide
  source 1..25: mol_type = other DNA
gataaacaaaagagaaaaacagcgg

SEQ ID NO: 30290 - DNA, 25 bp, synthetic construct
  misc_feature 1..25: note = Oligonucleotide
  source 1..25: mol_type = other DNA
agagataaacaaaagagaaaaacag

SEQ ID NO: 30291 - DNA, 25 bp, synthetic construct
  misc_feature 1..25: note = Oligonucleotide
  source 1..25: mol_type = other DNA
agcagagataaacaaaagagaaaaa

SEQ ID NO: 30292 - DNA, 25 bp, synthetic construct
  misc_feature 1..25: note = Oligonucleotide
  source 1..25: mol_type = other DNA
tagagcagagataaacaaaagagaa

SEQ ID NO: 30293 - DNA, 25 bp, synthetic construct
  misc_feature 1..25: note = Oligonucleotide
  source 1..25: mol_type = other DNA
gattagagcagagataaacaaaaga

SEQ ID NO: 30294 - DNA, 25 bp, synthetic construct
  misc_feature 1..25: note = Oligonucleotide
  source 1..25: mol_type = other DNA
taagattagagcagagataaacaaa

SEQ ID NO: 30295 - DNA, 25 bp, synthetic construct
  misc_feature 1..25: note = Oligonucleotide
  source 1..25: mol_type = other DNA
cagtaagattagagcagagataaac

SEQ ID NO: 30296 - DNA, 25 bp, synthetic construct
  misc_feature 1..25: note = Oligonucleotide
  source 1..25: mol_type = other DNA
aaacagtaagattagagcagagata

SEQ ID NO: 30297 - DNA, 25 bp, synthetic construct
  misc_feature 1..25: note = Oligonucleotide
  source 1..25: mol_type = other DNA
aggaaacagtaagattagagcagag

SEQ ID NO: 30298 - DNA, 25 bp, synthetic construct
  misc_feature 1..25: note = Oligonucleotide
  source 1..25: mol_type = other DNA
ggaaggaaacagtaagattagagca

SEQ ID NO: 30299 - DNA, 25 bp, synthetic construct
  misc_feature 1..25: note = Oligonucleotide
  source 1..25: mol_type = other DNA
gaaggaaggaaacagtaagattaga

SEQ ID NO: 30300 - DNA, 25 bp, synthetic construct
  misc_feature 1..25: note = Oligonucleotide
  source 1..25: mol_type = other DNA
gcagaaggaaggaaacagtaagatt

SEQ ID NO: 30301 - DNA, 25 bp, synthetic construct
  misc_feature 1..25: note = Oligonucleotide
  source 1..25: mol_type = other DNA
ctagcagaaggaaggaaacagtaag

SEQ ID NO: 30302 - DNA, 25 bp, synthetic construct
  misc_feature 1..25: note = Oligonucleotide
  source 1..25: mol_type = other DNA
aagctagcagaaggaaggaaacagt

SEQ ID NO: 30303 - DNA, 25 bp, synthetic construct
  misc_feature 1..25: note = Oligonucleotide
  source 1..25: mol_type = other DNA
gaaaagctagcagaaggaaggaaac

SEQ ID NO: 30304 - DNA, 25 bp, synthetic construct
  misc_feature 1..25: note = Oligonucleotide
  source 1..25: mol_type = other DNA
aaagaaaagctagcagaaggaagga

SEQ ID NO: 30305 - DNA, 25 bp, synthetic construct
  misc_feature 1..25: note = Oligonucleotide
  source 1..25: mol_type = other DNA
aagaaagaaaagctagcagaaggaa

SEQ ID NO: 30306 - DNA, 25 bp, synthetic construct
  misc_feature 1..25: note = Oligonucleotide
  source 1..25: mol_type = other DNA
caaaagaaagaaaagctagcagaag

SEQ ID NO: 30307 - DNA, 25 bp, synthetic construct
  misc_feature 1..25: note = Oligonucleotide
  source 1..25: mol_type = other DNA
tagcaaaagaaagaaaagctagcag

SEQ ID NO: 30308 - DNA, 25 bp, synthetic construct
  misc_feature 1..25: note = Oligonucleotide
  source 1..25: mol_type = other DNA
aactagcaaaagaaagaaaagctag

SEQ ID NO: 30309 - DNA, 25 bp, synthetic construct
  misc_feature 1..25: note = Oligonucleotide
  source 1..25: mol_type = other DNA
ccaaactagcaaaagaaagaaaagc

SEQ ID NO: 30310 - DNA, 25 bp, synthetic construct
  misc_feature 1..25: note = Oligonucleotide
  source 1..25: mol_type = other DNA
aaaccaaactagcaaaagaaagaaa

SEQ ID NO: 30311 - DNA, 25 bp, synthetic construct
  misc_feature 1..25: note = Oligonucleotide
  source 1..25: mol_type = other DNA
agcaaaccaaactagcaaaagaaag

SEQ ID NO: 30312 - DNA, 25 bp, synthetic construct
  misc_feature 1..25: note = Oligonucleotide
  source 1..25: mol_type = other DNA
aagagcaaaccaaactagcaaaaga

SEQ ID NO: 30313 - DNA, 25 bp, synthetic construct
  misc_feature 1..25: note = Oligonucleotide
  source 1..25: mol_type = other DNA
aagaagagcaaaccaaactagcaaa

SEQ ID NO: 30314 - DNA, 25 bp, synthetic construct
  misc_feature 1..25: note = Oligonucleotide
  source 1..25: mol_type = other DNA
agaaagaagagcaaaccaaactagc

SEQ ID NO: 30315 - DNA, 25 bp, synthetic construct
  misc_feature 1..25: note = Oligonucleotide
  source 1..25: mol_type = other DNA
aagagaaagaagagcaaaccaaact

SEQ ID NO: 30316 - DNA, 25 bp, synthetic construct
  misc_feature 1..25: note = Oligonucleotide
  source 1..25: mol_type = other DNA
aacaagagaaagaagagcaaaccaa

SEQ ID NO: 30317 - DNA, 25 bp, synthetic construct
  misc_feature 1..25: note = Oligonucleotide
  source 1..25: mol_type = other DNA
aaaaacaagagaaagaagagcaaac

SEQ ID NO: 30318 - DNA, 25 bp, synthetic construct
  misc_feature 1..25: note = Oligonucleotide
  source 1..25: mol_type = other DNA
caaaaaaacaagagaaagaagagca

SEQ ID NO: 30319 - DNA, 25 bp, synthetic construct
  misc_feature 1..25: note = Oligonucleotide
  source 1..25: mol_type = other DNA
aaacaaaaaaacaagagaaagaaga

SEQ ID NO: 30320 - DNA, 25 bp, synthetic construct
  misc_feature 1..25: note = Oligonucleotide
  source 1..25: mol_type = other DNA
aacaaacaaaaaaacaagagaaaga

SEQ ID NO: 30321 - DNA, 25 bp, synthetic construct
  misc_feature 1..25: note = Oligonucleotide
  source 1..25: mol_type = other DNA
agaaacaaacaaaaaaacaagagaa

SEQ ID NO: 30322 - DNA, 25 bp, synthetic construct
  misc_feature 1..25: note = Oligonucleotide
  source 1..25: mol_type = other DNA
aaaagaaacaaacaaaaaaacaaga

SEQ ID NO: 30323 - DNA, 25 bp, synthetic construct
  misc_feature 1..25: note = Oligonucleotide
  source 1..25: mol_type = other DNA
ccaaaaagaaacaaacaaaaaaaca

SEQ ID NO: 30324 - DNA, 25 bp, synthetic construct
  misc_feature 1..25: note = Oligonucleotide
  source 1..25: mol_type = other DNA
agaccaaaaagaaacaaacaaaaaa

SEQ ID NO: 30325 - DNA, 25 bp, synthetic construct
  misc_feature 1..25: note = Oligonucleotide
  source 1..25: mol_type = other DNA
gaaagaccaaaaagaaacaaacaaa

SEQ ID NO: 30326 - DNA, 25 bp, synthetic construct
  misc_feature 1..25: note = Oligonucleotide
  source 1..25: mol_type = other DNA
agagaaagaccaaaaagaaacaaac

SEQ ID NO: 30327 - DNA, 25 bp, synthetic construct
  misc_feature 1..25: note = Oligonucleotide
  source 1..25: mol_type = other DNA
actagagaaagaccaaaaagaaaca

SEQ ID NO: 30328 - DNA, 25 bp, synthetic construct
  misc_feature 1..25: note = Oligonucleotide
  source 1..25: mol_type = other DNA
cagactagagaaagaccaaaaagaa

SEQ ID NO: 30329 - DNA, 25 bp, synthetic construct
  misc_feature 1..25: note = Oligonucleotide
  source 1..25: mol_type = other DNA
ggacagactagagaaagaccaaaaa

SEQ ID NO: 30330 - DNA, 25 bp, synthetic construct
  misc_feature 1..25: note = Oligonucleotide
  source 1..25: mol_type = other DNA
gacggacagactagagaaagaccaa

SEQ ID NO: 30331 - DNA, 25 bp, synthetic construct
  misc_feature 1..25: note = Oligonucleotide
  source 1..25: mol_type = other DNA
agggacggacagactagagaaagac

SEQ ID NO: 30332 - DNA, 25 bp, synthetic construct
  misc_feature 1..25: note = Oligonucleotide
  source 1..25: mol_type = other DNA
cggagggacggacagactagagaaa

SEQ ID NO: 30333 - DNA, 25 bp, synthetic construct
  misc_feature 1..25: note = Oligonucleotide
  source 1..25: mol_type = other DNA
ggacggagggacggacagactagag

SEQ ID NO: 30334 - DNA, 25 bp, synthetic construct
  misc_feature 1..25: note = Oligonucleotide
  source 1..25: mol_type = other DNA
gagggacggagggacggacagacta

SEQ ID NO: 30335 - DNA, 25 bp, synthetic construct
  misc_feature 1..25: note = Oligonucleotide
  source 1..25: mol_type = other DNA
agggagggacggagggacggacaga

SEQ ID NO: 30336 - DNA, 25 bp, synthetic construct
  misc_feature 1..25: note = Oligonucleotide
  source 1..25: mol_type = other DNA
gagagggagggacggagggacggac

SEQ ID NO: 30337 - DNA, 25 bp, synthetic construct
  misc_feature 1..25: note = Oligonucleotide
  source 1..25: mol_type = other DNA
caagagagggagggacggagggacg

SEQ ID NO: 30338 - DNA, 25 bp, synthetic construct
  misc_feature 1..25: note = Oligonucleotide
  source 1..25: mol_type = other DNA
aagcaagagagggagggacggaggg

SEQ ID NO: 30339 - DNA, 25 bp, synthetic construct
  misc_feature 1..25: note = Oligonucleotide
  source 1..25: mol_type = other DNA
aggaagcaagagagggagggacgga

SEQ ID NO: 30340 - DNA, 25 bp, synthetic construct
  misc_feature 1..25: note = Oligonucleotide
  source 1..25: mol_type = other DNA
ggaaggaagcaagagagggagggac

SEQ ID NO: 30341 - DNA, 25 bp, synthetic construct
  misc_feature 1..25: note = Oligonucleotide
  source 1..25: mol_type = other DNA
agaggaaggaagcaagagagggagg

SEQ ID NO: 30342 - DNA, 25 bp, synthetic construct
  misc_feature 1..25: note = Oligonucleotide
  source 1..25: mol_type = other DNA
taaagaggaaggaagcaagagaggg

SEQ ID NO: 30343 - DNA, 25 bp, synthetic construct
  misc_feature 1..25: note = Oligonucleotide
  source 1..25: mol_type = other DNA
aaataaagaggaaggaagcaagaga

SEQ ID NO: 30344 - DNA, 25 bp, synthetic construct
  misc_feature 1..25: note = Oligonucleotide
  source 1..25: mol_type = other DNA
acaaaataaagaggaaggaagcaag

SEQ ID NO: 30345 - DNA, 25 bp, synthetic construct
  misc_feature 1..25: note = Oligonucleotide
  source 1..25: mol_type = other DNA
caaacaaaataaagaggaaggaagc

SEQ ID NO: 30346 - DNA, 25 bp, synthetic construct
  misc_feature 1..25: note = Oligonucleotide
  source 1..25: mol_type = other DNA
gagcaaacaaaataaagaggaagga

SEQ ID NO: 30347 - DNA, 25 bp, synthetic construct
  misc_feature 1..25: note = Oligonucleotide
  source 1..25: mol_type = other DNA
gaagagcaaacaaaataaagaggaa

SEQ ID NO: 30348 - DNA, 25 bp, synthetic construct
  misc_feature 1..25: note = Oligonucleotide
  source 1..25: mol_type = other DNA
aaagaagagcaaacaaaataaagag

SEQ ID NO: 30349 - DNA, 25 bp, synthetic construct
  misc_feature 1..25: note = Oligonucleotide
  source 1..25: mol_type = other DNA
gagaaagaagagcaaacaaaataaa

SEQ ID NO: 30350 - DNA, 25 bp, synthetic construct
  misc_feature 1..25: note = Oligonucleotide
  source 1..25: mol_type = other DNA
ctagagaaagaagagcaaacaaaat

SEQ ID NO: 30351 - DNA, 25 bp, synthetic construct
  misc_feature 1..25: note = Oligonucleotide
  source 1..25: mol_type = other DNA
aaactagagaaagaagagcaaacaa

SEQ ID NO: 30352 - DNA, 25 bp, synthetic construct
  misc_feature 1..25: note = Oligonucleotide
  source 1..25: mol_type = other DNA
aagaaactagagaaagaagagcaaa

SEQ ID NO: 30353 - DNA, 25 bp, synthetic construct
  misc_feature 1..25: note = Oligonucleotide
  source 1..25: mol_type = other DNA
aagaagaaactagagaaagaagagc

SEQ ID NO: 30354 - DNA, 25 bp, synthetic construct
  misc_feature 1..25: note = Oligonucleotide
  source 1..25: mol_type = other DNA
gaaaagaagaaactagagaaagaag

SEQ ID NO: 30355 - DNA, 25 bp, synthetic construct
  misc_feature 1..25: note = Oligonucleotide
  source 1..25: mol_type = other DNA
gaagaaaagaagaaactagagaaag

SEQ ID NO: 30356 - DNA, 25 bp, synthetic construct
  misc_feature 1..25: note = Oligonucleotide
  source 1..25: mol_type = other DNA
agagaagaaaagaagaaactagaga

SEQ ID NO: 30357 - DNA, 25 bp, synthetic construct
  misc_feature 1..25: note = Oligonucleotide
  source 1..25: mol_type = other DNA
gagagagaagaaaagaagaaactag

SEQ ID NO: 30358 - DNA, 25 bp, synthetic construct
  misc_feature 1..25: note = Oligonucleotide
  source 1..25: mol_type = other DNA
aaagagagagaagaaaagaagaaac

SEQ ID NO: 30359 - DNA, 25 bp, synthetic construct
  misc_feature 1..25: note = Oligonucleotide
  source 1..25: mol_type = other DNA
aaaaaagagagagaagaaaagaaga

SEQ ID NO: 30360 - DNA, 25 bp, synthetic construct
  misc_feature 1..25: note = Oligonucleotide
  source 1..25: mol_type = other DNA
aaaaaaaaagagagagaagaaaaga

SEQ ID NO: 30361 - DNA, 25 bp, synthetic construct
  misc_feature 1..25: note = Oligonucleotide
  source 1..25: mol_type = other DNA
caaaaaaaaaaagagagagaagaaa

SEQ ID NO: 30362 - DNA, 25 bp, synthetic construct
  misc_feature 1..25: note = Oligonucleotide
  source 1..25: mol_type = other DNA
ctccaaaaaaaaaaagagagagaag

SEQ ID NO: 30363 - DNA, 25 bp, synthetic construct
  misc_feature 1..25: note = Oligonucleotide
  source 1..25: mol_type = other DNA
catctccaaaaaaaaaaagagagag

SEQ ID NO: 30364 - DNA, 25 bp, synthetic construct
  misc_feature 1..25: note = Oligonucleotide
  source 1..25: mol_type = other DNA
ctccatctccaaaaaaaaaaagaga

SEQ ID NO: 30365 - DNA, 25 bp, synthetic construct
  misc_feature 1..25: note = Oligonucleotide
  source 1..25: mol_type = other DNA
aaactccatctccaaaaaaaaaaag

SEQ ID NO: 30366 - DNA, 25 bp, synthetic construct
  misc_feature 1..25: note = Oligonucleotide
  source 1..25: mol_type = other DNA
gcgaaactccatctccaaaaaaaaa

SEQ ID NO: 30367 - DNA, 25 bp, synthetic construct
  misc_feature 1..25: note = Oligonucleotide
  source 1..25: mol_type = other DNA
agagcgaaactccatctccaaaaaa

SEQ ID NO: 30368 - DNA, 25 bp, synthetic construct
  misc_feature 1..25: note = Oligonucleotide
  source 1..25: mol_type = other DNA
acaagagcgaaactccatctccaaa

SEQ ID NO: 30369 - DNA, 25 bp, synthetic construct
  misc_feature 1..25: note = Oligonucleotide
  source 1..25: mol_type = other DNA
gcaacaagagcgaaactccatctcc

SEQ ID NO: 30370 - DNA, 25 bp, synthetic construct
  misc_feature 1..25: note = Oligonucleotide
  source 1..25: mol_type = other DNA
tgggcaacaagagcgaaactccatc

SEQ ID NO: 30371 - DNA, 25 bp, synthetic construct
  misc_feature 1..25: note = Oligonucleotide
  source 1..25: mol_type = other DNA
gcctgggcaacaagagcgaaactcc

SEQ ID NO: 30372 - DNA, 25 bp, synthetic construct
  misc_feature 1..25: note = Oligonucleotide
  source 1..25: mol_type = other DNA
acagcctgggcaacaagagcgaaac

SEQ ID NO: 30373 - DNA, 25 bp, synthetic construct
  misc_feature 1..25: note = Oligonucleotide
  source 1..25: mol_type = other DNA
actacagcctgggcaacaagagcga

SEQ ID NO: 30374 - DNA, 25 bp, synthetic construct
  misc_feature 1..25: note = Oligonucleotide
  source 1..25: mol_type = other DNA
tgcactacagcctgggcaacaagag

SEQ ID NO: 30375 - DNA, 25 bp, synthetic construct
  misc_feature 1..25: note = Oligonucleotide
  source 1..25: mol_type = other DNA
cattgcactacagcctgggcaacaa

SEQ ID NO: 30376 - DNA, 25 bp, synthetic construct
  misc_feature 1..25: note = Oligonucleotide
  source 1..25: mol_type = other DNA
caccattgcactacagcctgggcaa

SEQ ID NO: 30377 - DNA, 25 bp, synthetic construct
  misc_feature 1..25: note = Oligonucleotide
  source 1..25: mol_type = other DNA
tcacaccattgcactacagcctggg

SEQ ID NO: 30378 - DNA, 25 bp, synthetic construct
  misc_feature 1..25: note = Oligonucleotide
  source 1..25: mol_type = other DNA
agatcacaccattgcactacagcct

SEQ ID NO: 30379 - DNA, 25 bp, synthetic construct
  misc_feature 1..25: note = Oligonucleotide
  source 1..25: mol_type = other DNA
ctgagatcacaccattgcactacag

SEQ ID NO: 30380 - DNA, 25 bp, synthetic construct
  misc_feature 1..25: note = Oligonucleotide
  source 1..25: mol_type = other DNA
gagctgagatcacaccattgcacta

SEQ ID NO: 30381 - DNA, 25 bp, synthetic construct
  misc_feature 1..25: note = Oligonucleotide
  source 1..25: mol_type = other DNA
ggtgagctgagatcacaccattgca

SEQ ID NO: 30382 - DNA, 25 bp, synthetic construct
  misc_feature 1..25: note = Oligonucleotide
  source 1..25: mol_type = other DNA
tgtggtgagctgagatcacaccatt

SEQ ID NO: 30383 - DNA, 25 bp, synthetic construct
  misc_feature 1..25: note = Oligonucleotide
  source 1..25: mol_type = other DNA
ggttgtggtgagctgagatcacacc

SEQ ID NO: 30384 - DNA, 25 bp, synthetic construct
  misc_feature 1..25: note = Oligonucleotide
  source 1..25: mol_type = other DNA
ggaggttgtggtgagctgagatcac

SEQ ID NO: 30385 - DNA, 25 bp, synthetic construct
  misc_feature 1..25: note = Oligonucleotide
  source 1..25: mol_type = other DNA
ggcggaggttgtggtgagctgagat

SEQ ID NO: 30386 - DNA, 25 bp, synthetic construct
  misc_feature 1..25: note = Oligonucleotide
  source 1..25: mol_type = other DNA
gttggcggaggttgtggtgagctga

SEQ ID NO: 30387 - DNA, 25 bp, synthetic construct
  misc_feature 1..25: note = Oligonucleotide
  source 1..25: mol_type = other DNA
ccagttggcggaggttgtggtgagc

SEQ ID NO: 30388 - DNA, 25 bp, synthetic construct
  misc_feature 1..25: note = Oligonucleotide
  source 1..25: mol_type = other DNA
aacccagttggcggaggttgtggtg

SEQ ID NO: 30389 - DNA, 25 bp, synthetic construct
  misc_feature 1..25: note = Oligonucleotide
  source 1..25: mol_type = other DNA
ttgaacccagttggcggaggttgtg

SEQ ID NO: 30390 - DNA, 25 bp, synthetic construct
  misc_feature 1..25: note = Oligonucleotide
  source 1..25: mol_type = other DNA
cgcttgaacccagttggcggaggtt

SEQ ID NO: 30391 - DNA, 25 bp, synthetic construct
  misc_feature 1..25: note = Oligonucleotide
  source 1..25: mol_type = other DNA
aatcgcttgaacccagttggcggag

SEQ ID NO: 30392 - DNA, 25 bp, synthetic construct
  misc_feature 1..25: note = Oligonucleotide
  source 1..25: mol_type = other DNA
gagaatcgcttgaacccagttggcg

SEQ ID NO: 30393 - DNA, 25 bp, synthetic construct
  misc_feature 1..25: note = Oligonucleotide
  source 1..25: mol_type = other DNA
caggagaatcgcttgaacccagttg

SEQ ID NO: 30394 - DNA, 25 bp, synthetic construct
  misc_feature 1..25: note = Oligonucleotide
  source 1..25: mol_type = other DNA
aggcaggagaatcgcttgaacccag

SEQ ID NO: 30395 - DNA, 25 bp, synthetic construct
  misc_feature 1..25: note = Oligonucleotide
  source 1..25: mol_type = other DNA
ctgaggcaggagaatcgcttgaacc

SEQ ID NO: 30396 - DNA, 25 bp, synthetic construct
  misc_feature 1..25: note = Oligonucleotide
  source 1..25: mol_type = other DNA
aggctgaggcaggagaatcgcttga

SEQ ID NO: 30397 - DNA, 25 bp, synthetic construct
  misc_feature 1..25: note = Oligonucleotide
  source 1..25: mol_type = other DNA
gggaggctgaggcaggagaatcgct

SEQ ID NO: 30398 - DNA, 25 bp, synthetic construct
  misc_feature 1..25: note = Oligonucleotide
  source 1..25: mol_type = other DNA
ctcgggaggctgaggcaggagaatc

SEQ ID NO: 30399 - DNA, 25 bp, synthetic construct
  misc_feature 1..25: note = Oligonucleotide
  source 1..25: mol_type = other DNA
ctactcgggaggctgaggcaggaga

SEQ ID NO: 30400 - DNA, 25 bp, synthetic construct
  misc_feature 1..25: note = Oligonucleotide
  source 1..25: mol_type = other DNA
cagctactcgggaggctgaggcagg

SEQ ID NO: 30401 - DNA, 25 bp, synthetic construct
  misc_feature 1..25: note = Oligonucleotide
  source 1..25: mol_type = other DNA
tcccagctactcgggaggctgaggc

SEQ ID NO: 30402 - DNA, 25 bp, synthetic construct
  misc_feature 1..25: note = Oligonucleotide
  source 1..25: mol_type = other DNA
taatcccagctactcgggaggctga

SEQ ID NO: 30403 - DNA, 25 bp, synthetic construct
  misc_feature 1..25: note = Oligonucleotide
  source 1..25: mol_type = other DNA
ctgtaatcccagctactcgggaggc

SEQ ID NO: 30404 - DNA, 25 bp, synthetic construct
  misc_feature 1..25: note = Oligonucleotide
  source 1..25: mol_type = other DNA
tccctgtaatcccagctactcggga

SEQ ID NO: 30405 - DNA, 25 bp, synthetic construct
  misc_feature 1..25: note = Oligonucleotide
  source 1..25: mol_type = other DNA
gggtccctgtaatcccagctactcg

SEQ ID NO: 30406 - DNA, 25 bp, synthetic construct
  misc_feature 1..25: note = Oligonucleotide
  source 1..25: mol_type = other DNA
ggtgggtccctgtaatcccagctac

SEQ ID NO: 30407 - DNA, 25 bp, synthetic construct
  misc_feature 1..25: note = Oligonucleotide
  source 1..25: mol_type = other DNA
ggtggtgggtccctgtaatcccagc

SEQ ID NO: 30408 - DNA, 25 bp, synthetic construct
  misc_feature 1..25: note = Oligonucleotide
  source 1..25: mol_type = other DNA
catggtggtgggtccctgtaatccc

SEQ ID NO: 30409 - DNA, 25 bp, synthetic construct
  misc_feature 1..25: note = Oligonucleotide
  source 1..25: mol_type = other DNA
aggcatggtggtgggtccctgtaat

SEQ ID NO: 30410 - DNA, 25 bp, synthetic construct
  misc_feature 1..25: note = Oligonucleotide
  source 1..25: mol_type = other DNA
gccaggcatggtggtgggtccctgt

SEQ ID NO: 30411 - DNA, 25 bp, synthetic construct
  misc_feature 1..25: note = Oligonucleotide
  source 1..25: mol_type = other DNA
ttagccaggcatggtggtgggtccc

SEQ ID NO: 30412 - DNA, 25 bp, synthetic construct
  misc_feature 1..25: note = Oligonucleotide
  source 1..25: mol_type = other DNA
aaattagccaggcatggtggtgggt

SEQ ID NO: 30413 - DNA, 25 bp, synthetic construct
  misc_feature 1..25: note = Oligonucleotide
  source 1..25: mol_type = other DNA
acaaaattagccaggcatggtggtg

SEQ ID NO: 30414 - DNA, 25 bp, synthetic construct
  misc_feature 1..25: note = Oligonucleotide
  source 1..25: mol_type = other DNA
aatacaaaattagccaggcatggtg

SEQ ID NO: 30415 - DNA, 25 bp, synthetic construct
  misc_feature 1..25: note = Oligonucleotide
  source 1..25: mol_type = other DNA
aaaaatacaaaattagccaggcatg

SEQ ID NO: 30416 - DNA, 25 bp, synthetic construct
  misc_feature 1..25: note = Oligonucleotide
  source 1..25: mol_type = other DNA
ctaaaaaatacaaaattagccaggc

SEQ ID NO: 30417 - DNA, 25 bp, synthetic construct
  misc_feature 1..25: note = Oligonucleotide
  source 1..25: mol_type = other DNA
cctctaaaaaatacaaaattagcca

SEQ ID NO: 30418 - DNA, 25 bp, synthetic construct
  misc_feature 1..25: note = Oligonucleotide
  source 1..25: mol_type = other DNA
ctgcctctaaaaaatacaaaattag

SEQ ID NO: 30419 - DNA, 25 bp, synthetic construct
  misc_feature 1..25: note = Oligonucleotide
  source 1..25: mol_type = other DNA
actctgcctctaaaaaatacaaaat

SEQ ID NO: 30420 - DNA, 25 bp, synthetic construct
  misc_feature 1..25: note = Oligonucleotide
  source 1..25: mol_type = other DNA
gaaactctgcctctaaaaaatacaa

SEQ ID NO: 30421 - DNA, 25 bp, synthetic construct
  misc_feature 1..25: note = Oligonucleotide
  source 1..25: mol_type = other DNA
gaagaaactctgcctctaaaaaata

SEQ ID NO: 30422 - DNA, 25 bp, synthetic construct
  misc_feature 1..25: note = Oligonucleotide
  source 1..25: mol_type = other DNA
catgaagaaactctgcctctaaaaa

SEQ ID NO: 30423 - DNA, 25 bp, synthetic construct
  misc_feature 1..25: note = Oligonucleotide
  source 1..25: mol_type = other DNA
caacatgaagaaactctgcctctaa

SEQ ID NO: 30424 - DNA, 25 bp, synthetic construct
  misc_feature 1..25: note = Oligonucleotide
  source 1..25: mol_type = other DNA
gaccaacatgaagaaactctgcctc

SEQ ID NO: 30425 - DNA, 25 bp, synthetic construct
  misc_feature 1..25: note = Oligonucleotide
  source 1..25: mol_type = other DNA
cctgaccaacatgaagaaactctgc

SEQ ID NO: 30426 - DNA, 25 bp, synthetic construct
  misc_feature 1..25: note = Oligonucleotide
  source 1..25: mol_type = other DNA
cagcctgaccaacatgaagaaactc

SEQ ID NO: 30427 - DNA, 25 bp, synthetic construct
  misc_feature 1..25: note = Oligonucleotide
  source 1..25: mol_type = other DNA
gaccagcctgaccaacatgaagaaa

SEQ ID NO: 30428 - DNA, 25 bp, synthetic construct
  misc_feature 1..25: note = Oligonucleotide
  source 1..25: mol_type = other DNA
cgagaccagcctgaccaacatgaag

SEQ ID NO: 30429 - DNA, 25 bp, synthetic construct
  misc_feature 1..25: note = Oligonucleotide
  source 1..25: mol_type = other DNA
gttcgagaccagcctgaccaacatg

SEQ ID NO: 30430 - DNA, 25 bp, synthetic construct
  misc_feature 1..25: note = Oligonucleotide
  source 1..25: mol_type = other DNA
ggagttcgagaccagcctgaccaac

SEQ ID NO: 30431 - DNA, 25 bp, synthetic construct
  misc_feature 1..25: note = Oligonucleotide
  source 1..25: mol_type = other DNA
ttgggagttcgagaccagcctgacc

SEQ ID NO: 30432 - DNA, 25 bp, synthetic construct
  misc_feature 1..25: note = Oligonucleotide
  source 1..25: mol_type = other DNA
aggttgggagttcgagaccagcctg

SEQ ID NO: 30433 - DNA, 25 bp, synthetic construct
  misc_feature 1..25: note = Oligonucleotide
  source 1..25: mol_type = other DNA
ctgaggttgggagttcgagaccagc

SEQ ID NO: 30434 - DNA, 25 bp, synthetic construct
  misc_feature 1..25: note = Oligonucleotide
  source 1..25: mol_type = other DNA
cacctgaggttgggagttcgagacc

SEQ ID NO: 30435 - DNA, 25 bp, synthetic construct
  misc_feature 1..25: note = Oligonucleotide
  source 1..25: mol_type = other DNA
gatcacctgaggttgggagttcgag

SEQ ID NO: 30436 - DNA, 25 bp, synthetic construct
  misc_feature 1..25: note = Oligonucleotide
  source 1..25: mol_type = other DNA
gcagatcacctgaggttgggagttc

SEQ ID NO: 30437 - DNA, 25 bp, synthetic construct
  misc_feature 1..25: note = Oligonucleotide
  source 1..25: mol_type = other DNA
caggcagatcacctgaggttgggag

SEQ ID NO: 30438 - DNA, 25 bp, synthetic construct
  misc_feature 1..25: note = Oligonucleotide
  source 1..25: mol_type = other DNA
aggcaggcagatcacctgaggttgg

SEQ ID NO: 30439 - DNA, 25 bp, synthetic construct
  misc_feature 1..25: note = Oligonucleotide
  source 1..25: mol_type = other DNA
ccgaggcaggcagatcacctgaggt

SEQ ID NO: 30440 - DNA, 25 bp, synthetic construct
  misc_feature 1..25: note = Oligonucleotide
  source 1..25: mol_type = other DNA
aggccgaggcaggcagatcacctga

SEQ ID NO: 30441 - DNA, 25 bp, synthetic construct
  misc_feature 1..25: note = Oligonucleotide
  source 1..25: mol_type = other DNA
gggaggccgaggcaggcagatcacc

SEQ ID NO: 30442 - DNA, 25 bp, synthetic construct
  misc_feature 1..25: note = Oligonucleotide
  source 1..25: mol_type = other DNA
cttgggaggccgaggcaggcagatc

SEQ ID NO: 30443 - DNA, 25 bp, synthetic construct
  misc_feature 1..25: note = Oligonucleotide
  source 1..25: mol_type = other DNA
gcacttgggaggccgaggcaggcag

SEQ ID NO: 30444 - DNA, 25 bp, synthetic construct
  misc_feature 1..25: note = Oligonucleotide
  source 1..25: mol_type = other DNA
ccagcacttgggaggccgaggcagg

SEQ ID NO: 30445 - DNA, 25 bp, synthetic construct
  misc_feature 1..25: note = Oligonucleotide
  source 1..25: mol_type = other DNA
atcccagcacttgggaggccgaggc

SEQ ID NO: 30446 - DNA, 25 bp, synthetic construct
  misc_feature 1..25: note = Oligonucleotide
  source 1..25: mol_type = other DNA
gtaatcccagcacttgggaggccga

SEQ ID NO: 30447 - DNA, 25 bp, synthetic construct
  misc_feature 1..25: note = Oligonucleotide
  source 1..25: mol_type = other DNA
cctgtaatcccagcacttgggaggc

SEQ ID NO: 30448 - DNA, 25 bp, synthetic construct
  misc_feature 1..25: note = Oligonucleotide
  source 1..25: mol_type = other DNA
atgcctgtaatcccagcacttggga

SEQ ID NO: 30449 - DNA, 25 bp, synthetic construct
  misc_feature 1..25: note = Oligonucleotide
  source 1..25: mol_type = other DNA
ctcatgcctgtaatcccagcacttg

SEQ ID NO: 30450 - DNA, 25 bp, synthetic construct
  misc_feature 1..25: note = Oligonucleotide
  source 1..25: mol_type = other DNA
tggctcatgcctgtaatcccagcac

SEQ ID NO: 30451 - DNA, 25 bp, synthetic construct
  misc_feature 1..25: note = Oligonucleotide
  source 1..25: mol_type = other DNA
cagtggctcatgcctgtaatcccag

SEQ ID NO: 30452 - DNA, 25 bp, synthetic construct
  misc_feature 1..25: note = Oligonucleotide
  source 1..25: mol_type = other DNA
gcacagtggctcatgcctgtaatcc

SEQ ID NO: 30453 - DNA, 25 bp, synthetic construct
  misc_feature 1..25: note = Oligonucleotide
  source 1..25: mol_type = other DNA
cgggcacagtggctcatgcctgtaa

SEQ ID NO: 30454 - DNA, 25 bp, synthetic construct
  misc_feature 1..25: note = Oligonucleotide
  source 1..25: mol_type = other DNA
ggccgggcacagtggctcatgcctg

SEQ ID NO: 30455 - DNA, 25 bp, synthetic construct
  misc_feature 1..25: note = Oligonucleotide
  source 1..25: mol_type = other DNA
agaggccgggcacagtggctcatgc

SEQ ID NO: 30456 - DNA, 25 bp, synthetic construct
  misc_feature 1..25: note = Oligonucleotide
  source 1..25: mol_type = other DNA
aaaagaggccgggcacagtggctca

SEQ ID NO: 30457 - DNA, 25 bp, synthetic construct
  misc_feature 1..25: note = Oligonucleotide
  source 1..25: mol_type = other DNA
aagaaaagaggccgggcacagtggc

SEQ ID NO: 30458 - DNA, 25 bp, synthetic construct
  misc_feature 1..25: note = Oligonucleotide
  source 1..25: mol_type = other DNA
gaaaagaaaagaggccgggcacagt

SEQ ID NO: 30459 - DNA, 25 bp, synthetic construct
  misc_feature 1..25: note = Oligonucleotide
  source 1..25: mol_type = other DNA
aaagaaaagaaaagaggccgggcac

SEQ ID NO: 30460 - DNA, 25 bp, synthetic construct
  misc_feature 1..25: note = Oligonucleotide
  source 1..25: mol_type = other DNA
ataaaagaaaagaaaagaggccggg

SEQ ID NO: 30461 - DNA, 25 bp, synthetic construct
  misc_feature 1..25: note = Oligonucleotide
  source 1..25: mol_type = other DNA
ccaataaaagaaaagaaaagaggcc

SEQ ID NO: 30462 - DNA, 25 bp, synthetic construct
  misc_feature 1..25: note = Oligonucleotide
  source 1..25: mol_type = other DNA
gaaccaataaaagaaaagaaaagag

SEQ ID NO: 30463 - DNA, 25 bp, synthetic construct
  misc_feature 1..25: note = Oligonucleotide
  source 1..25: mol_type = other DNA
aatgaaccaataaaagaaaagaaaa

SEQ ID NO: 30464 - DNA, 25 bp, synthetic construct
  misc_feature 1..25: note = Oligonucleotide
  source 1..25: mol_type = other DNA
atgaatgaaccaataaaagaaaaga

SEQ ID NO: 30465 - DNA, 25 bp, synthetic construct
  misc_feature 1..25: note = Oligonucleotide
  source 1..25: mol_type = other DNA
tgtatgaatgaaccaataaaagaaa

SEQ ID NO: 30466 - DNA, 25 bp, synthetic construct
  misc_feature 1..25: note = Oligonucleotide
  source 1..25: mol_type = other DNA
gtctgtatgaatgaaccaataaaag

SEQ ID NO: 30467 - DNA, 25 bp, synthetic construct
  misc_feature 1..25: note = Oligonucleotide
  source 1..25: mol_type = other DNA
cttgtctgtatgaatgaaccaataa

SEQ ID NO: 30468 - DNA, 25 bp, synthetic construct
  misc_feature 1..25: note = Oligonucleotide
  source 1..25: mol_type = other DNA
gaccttgtctgtatgaatgaaccaa

SEQ ID NO: 30469 - DNA, 25 bp, synthetic construct
  misc_feature 1..25: note = Oligonucleotide
  source 1..25: mol_type = other DNA
tgagaccttgtctgtatgaatgaac

SEQ ID NO: 30470 - DNA, 25 bp, synthetic construct
  misc_feature 1..25: note = Oligonucleotide
  source 1..25: mol_type = other DNA
tagtgagaccttgtctgtatgaatg

SEQ ID NO: 30471 - DNA, 25 bp, synthetic construct
  misc_feature 1..25: note = Oligonucleotide
  source 1..25: mol_type = other DNA
acatagtgagaccttgtctgtatga

SEQ ID NO: 30472 - DNA, 25 bp, synthetic construct
  misc_feature 1..25: note = Oligonucleotide
  source 1..25: mol_type = other DNA
gcaacatagtgagaccttgtctgta

SEQ ID NO: 30473 - DNA, 25 bp, synthetic construct
  misc_feature 1..25: note = Oligonucleotide
  source 1..25: mol_type = other DNA
ctagcaacatagtgagaccttgtct

SEQ ID NO: 30474 - DNA, 25 bp, synthetic construct
  misc_feature 1..25: note = Oligonucleotide
  source 1..25: mol_type = other DNA
agcctagcaacatagtgagaccttg

SEQ ID NO: 30475 - DNA, 25 bp, synthetic construct
  misc_feature 1..25: note = Oligonucleotide
  source 1..25: mol_type = other DNA
accagcctagcaacatagtgagacc

SEQ ID NO: 30476 - DNA, 25 bp, synthetic construct
  misc_feature 1..25: note = Oligonucleotide
  source 1..25: mol_type = other DNA
aagaccagcctagcaacatagtgag

SEQ ID NO: 30477 - DNA, 25 bp, synthetic construct
  misc_feature 1..25: note = Oligonucleotide
  source 1..25: mol_type = other DNA
ctcaagaccagcctagcaacatagt

SEQ ID NO: 30478 - DNA, 25 bp, synthetic construct
  misc_feature 1..25: note = Oligonucleotide
  source 1..25: mol_type = other DNA
gagctcaagaccagcctagcaacat

SEQ ID NO: 30479 - DNA, 25 bp, synthetic construct
  misc_feature 1..25: note = Oligonucleotide
  source 1..25: mol_type = other DNA
caggagctcaagaccagcctagcaa

SEQ ID NO: 30480 - DNA, 25 bp, synthetic construct
  misc_feature 1..25: note = Oligonucleotide
  source 1..25: mol_type = other DNA
gcccaggagctcaagaccagcctag

SEQ ID NO: 30481 - DNA, 25 bp, synthetic construct
  misc_feature 1..25: note = Oligonucleotide
  source 1..25: mol_type = other DNA
tcagcccaggagctcaagaccagcc

SEQ ID NO: 30482 - DNA, 25 bp, synthetic construct
  misc_feature 1..25: note = Oligonucleotide
  source 1..25: mol_type = other DNA
acttcagcccaggagctcaagacca

SEQ ID NO: 30483 - DNA, 25 bp, synthetic construct
  misc_feature 1..25: note = Oligonucleotide
  source 1..25: mol_type = other DNA
atcacttcagcccaggagctcaaga

SEQ ID NO: 30484 - DNA, 25 bp, synthetic construct
  misc_feature 1..25: note = Oligonucleotide
  source 1..25: mol_type = other DNA
agcatcacttcagcccaggagctca

SEQ ID NO: 30485 - DNA, 25 bp, synthetic construct
  misc_feature 1..25: note = Oligonucleotide
  source 1..25: mol_type = other DNA
gggagcatcacttcagcccaggagc

SEQ ID NO: 30486 - DNA, 25 bp, synthetic construct
  misc_feature 1..25: note = Oligonucleotide
  source 1..25: mol_type = other DNA
agcgggagcatcacttcagcccagg

SEQ ID NO: 30487 - DNA, 25 bp, synthetic construct
  misc_feature 1..25: note = Oligonucleotide
  source 1..25: mol_type = other DNA
caaagcgggagcatcacttcagccc

SEQ ID NO: 30488 - DNA, 25 bp, synthetic construct
  misc_feature 1..25: note = Oligonucleotide
  source 1..25: mol_type = other DNA
ggccaaagcgggagcatcacttcag

SEQ ID NO: 30489 - DNA, 25 bp, synthetic construct
  misc_feature 1..25: note = Oligonucleotide
  source 1..25: mol_type = other DNA
ggaggccaaagcgggagcatcactt

SEQ ID NO: 30490 - DNA, 25 bp, synthetic construct
  misc_feature 1..25: note = Oligonucleotide
  source 1..25: mol_type = other DNA
ttgggaggccaaagcgggagcatca

SEQ ID NO: 30491 - DNA, 25 bp, synthetic construct
  misc_feature 1..25: note = Oligonucleotide
  source 1..25: mol_type = other DNA
actttgggaggccaaagcgggagca

SEQ ID NO: 30492 - DNA, 25 bp, synthetic construct
  misc_feature 1..25: note = Oligonucleotide
  source 1..25: mol_type = other DNA
agcactttgggaggccaaagcggga

SEQ ID NO: 30493 - DNA, 25 bp, synthetic construct
  misc_feature 1..25: note = Oligonucleotide
  source 1..25: mol_type = other DNA
cccagcactttgggaggccaaagcg

SEQ ID NO: 30494 - DNA, 25 bp, synthetic construct
  misc_feature 1..25: note = Oligonucleotide
  source 1..25: mol_type = other DNA
aatcccagcactttgggaggccaaa

SEQ ID NO: 30495 - DNA, 25 bp, synthetic construct
  misc_feature 1..25: note = Oligonucleotide
  source 1..25: mol_type = other DNA
tgtaatcccagcactttgggaggcc

SEQ ID NO: 30496 - DNA, 25 bp, synthetic construct
  misc_feature 1..25: note = Oligonucleotide
  source 1..25: mol_type = other DNA
gcctgtaatcccagcactttgggag

SEQ ID NO: 30497 - DNA, 25 bp, synthetic construct
  misc_feature 1..25: note = Oligonucleotide
  source 1..25: mol_type = other DNA
catgcctgtaatcccagcactttgg

SEQ ID NO: 30498 - DNA, 25 bp, synthetic construct
  misc_feature 1..25: note = Oligonucleotide
  source 1..25: mol_type = other DNA
gctcatgcctgtaatcccagcactt

SEQ ID NO: 30499 - DNA, 25 bp, synthetic construct
  misc_feature 1..25: note = Oligonucleotide
  source 1..25: mol_type = other DNA
gtggctcatgcctgtaatcccagca

SEQ ID NO: 30500 - DNA, 25 bp, synthetic construct
  misc_feature 1..25: note = Oligonucleotide
  source 1..25: mol_type = other DNA
tcagtggctcatgcctgtaatccca

SEQ ID NO: 30501 - DNA, 25 bp, synthetic construct
  misc_feature 1..25: note = Oligonucleotide
  source 1..25: mol_type = other DNA
ggctcagtggctcatgcctgtaatc

SEQ ID NO: 30502 - DNA, 25 bp, synthetic construct
  misc_feature 1..25: note = Oligonucleotide
  source 1..25: mol_type = other DNA
cgaggctcagtggctcatgcctgta

SEQ ID NO: 30503 - DNA, 25 bp, synthetic construct
  misc_feature 1..25: note = Oligonucleotide
  source 1..25: mol_type = other DNA
aggcgaggctcagtggctcatgcct

SEQ ID NO: 30504 - DNA, 25 bp, synthetic construct
  misc_feature 1..25: note = Oligonucleotide
  source 1..25: mol_type = other DNA
agaaggcgaggctcagtggctcatg

SEQ ID NO: 30505 - DNA, 25 bp, synthetic construct
  misc_feature 1..25: note = Oligonucleotide
  source 1..25: mol_type = other DNA
acgagaaggcgaggctcagtggctc

SEQ ID NO: 30506 - DNA, 25 bp, synthetic construct
  misc_feature 1..25: note = Oligonucleotide
  source 1..25: mol_type = other DNA
gaaacgagaaggcgaggctcagtgg

SEQ ID NO: 30507 - DNA, 25 bp, synthetic construct
  misc_feature 1..25: note = Oligonucleotide
  source 1..25: mol_type = other DNA
aaagaaacgagaaggcgaggctcag

SEQ ID NO: 30508 - DNA, 25 bp, synthetic construct
  misc_feature 1..25: note = Oligonucleotide
  source 1..25: mol_type = other DNA
aaaaaagaaacgagaaggcgaggct

SEQ ID NO: 30509 - DNA, 25 bp, synthetic construct
  misc_feature 1..25: note = Oligonucleotide
  source 1..25: mol_type = other DNA
aacaaaaaagaaacgagaaggcgag

SEQ ID NO: 30510 - DNA, 25 bp, synthetic construct
  misc_feature 1..25: note = Oligonucleotide
  source 1..25: mol_type = other DNA
agaaacaaaaaagaaacgagaaggc

SEQ ID NO: 30511 - DNA, 25 bp, synthetic construct
  misc_feature 1..25: note = Oligonucleotide
  source 1..25: mol_type = other DNA
aaaagaaacaaaaaagaaacgagaa

SEQ ID NO: 30512 - DNA, 25 bp, synthetic construct
  misc_feature 1..25: note = Oligonucleotide
  source 1..25: mol_type = other DNA
aaaaaaagaaacaaaaaagaaacga

SEQ ID NO: 30513 - DNA, 25 bp, synthetic construct
  misc_feature 1..25: note = Oligonucleotide
  source 1..25: mol_type = other DNA
cgaaaaaaaagaaacaaaaaagaaa

SEQ ID NO: 30514 - DNA, 25 bp, synthetic construct
  misc_feature 1..25: note = Oligonucleotide
  source 1..25: mol_type = other DNA
tcacgaaaaaaaagaaacaaaaaag

SEQ ID NO: 30515 - DNA, 25 bp, synthetic construct
  misc_feature 1..25: note = Oligonucleotide
  source 1..25: mol_type = other DNA
atctcacgaaaaaaaagaaacaaaa

SEQ ID NO: 30516 - DNA, 25 bp, synthetic construct
  misc_feature 1..25: note = Oligonucleotide
  source 1..25: mol_type = other DNA
tccatctcacgaaaaaaaagaaaca

SEQ ID NO: 30517 - DNA, 25 bp, synthetic construct
  misc_feature 1..25: note = Oligonucleotide
  source 1..25: mol_type = other DNA
aactccatctcacgaaaaaaaagaa

SEQ ID NO: 30518 - DNA, 25 bp, synthetic construct
  misc_feature 1..25: note = Oligonucleotide
  source 1..25: mol_type = other DNA
tgaaactccatctcacgaaaaaaaa

SEQ ID NO: 30519 - DNA, 25 bp, synthetic construct
  misc_feature 1..25: note = Oligonucleotide
  source 1..25: mol_type = other DNA
gagtgaaactccatctcacgaaaaa

SEQ ID NO: 30520 - DNA, 25 bp, synthetic construct
  misc_feature 1..25: note = Oligonucleotide
  source 1..25: mol_type = other DNA
caagagtgaaactccatctcacgaa

SEQ ID NO: 30521 - DNA, 25 bp, synthetic construct
  misc_feature 1..25: note = Oligonucleotide
  source 1..25: mol_type = other DNA
caccaagagtgaaactccatctcac

SEQ ID NO: 30522 - DNA, 25 bp, synthetic construct
  misc_feature 1..25: note = Oligonucleotide
  source 1..25: mol_type = other DNA
gggcaccaagagtgaaactccatct

SEQ ID NO: 30523 - DNA, 25 bp, synthetic construct
  misc_feature 1..25: note = Oligonucleotide
  source 1..25: mol_type = other DNA
cctgggcaccaagagtgaaactcca

SEQ ID NO: 30524 - DNA, 25 bp, synthetic construct
  misc_feature 1..25: note = Oligonucleotide
  source 1..25: mol_type = other DNA
ccgcctgggcaccaagagtgaaact

SEQ ID NO: 30525 - DNA, 25 bp, synthetic construct
  misc_feature 1..25: note = Oligonucleotide
  source 1..25: mol_type = other DNA
ctaccgcctgggcaccaagagtgaa

SEQ ID NO: 30526 - DNA, 25 bp, synthetic construct
  misc_feature 1..25: note = Oligonucleotide
  source 1..25: mol_type = other DNA
gcactaccgcctgggcaccaagagt

SEQ ID NO: 30527 - DNA, 25 bp, synthetic construct
  misc_feature 1..25: note = Oligonucleotide
  source 1..25: mol_type = other DNA
attgcactaccgcctgggcaccaag

SEQ ID NO: 30528 - DNA, 25 bp, synthetic construct
  misc_feature 1..25: note = Oligonucleotide
  source 1..25: mol_type = other DNA
gccattgcactaccgcctgggcacc

SEQ ID NO: 30529 - DNA, 25 bp, synthetic construct
  misc_feature 1..25: note = Oligonucleotide
  source 1..25: mol_type = other DNA
tgcgccattgcactaccgcctgggc

SEQ ID NO: 30530 - DNA, 25 bp, synthetic construct
  misc_feature 1..25: note = Oligonucleotide
  source 1..25: mol_type = other DNA
gattgcgccattgcactaccgcctg

SEQ ID NO: 30531 - DNA, 25 bp, synthetic construct
  misc_feature 1..25: note = Oligonucleotide
  source 1..25: mol_type = other DNA
caagattgcgccattgcactaccgc

SEQ ID NO: 30532 - DNA, 25 bp, synthetic construct
  misc_feature 1..25: note = Oligonucleotide
  source 1..25: mol_type = other DNA
agccaagattgcgccattgcactac

SEQ ID NO: 30533 - DNA, 25 bp, synthetic construct
  misc_feature 1..25: note = Oligonucleotide
  source 1..25: mol_type = other DNA
gtgagccaagattgcgccattgcac

SEQ ID NO: 30534 - DNA, 25 bp, synthetic construct
  misc_feature 1..25: note = Oligonucleotide
  source 1..25: mol_type = other DNA
gtggtgagccaagattgcgccattg

SEQ ID NO: 30535 - DNA, 25 bp, synthetic construct
  misc_feature 1..25: note = Oligonucleotide
  source 1..25: mol_type = other DNA
gtggtggtgagccaagattgcgcca

SEQ ID NO: 30536 - DNA, 25 bp, synthetic construct
  misc_feature 1..25: note = Oligonucleotide
  source 1..25: mol_type = other DNA
gaggtggtggtgagccaagattgcg

SEQ ID NO: 30537 - DNA, 25 bp, synthetic construct
  misc_feature 1..25: note = Oligonucleotide
  source 1..25: mol_type = other DNA
gcggaggtggtggtgagccaagatt

SEQ ID NO: 30538 - DNA, 25 bp, synthetic construct
  misc_feature 1..25: note = Oligonucleotide
  source 1..25: mol_type = other DNA
gaggcggaggtggtggtgagccaag

SEQ ID NO: 30539 - DNA, 25 bp, synthetic construct
  misc_feature 1..25: note = Oligonucleotide
  source 1..25: mol_type = other DNA
caggaggcggaggtggtggtgagcc

SEQ ID NO: 30540 - DNA, 25 bp, synthetic construct
  misc_feature 1..25: note = Oligonucleotide
  source 1..25: mol_type = other DNA
acccaggaggcggaggtggtggtga

SEQ ID NO: 30541 - DNA, 25 bp, synthetic construct
  misc_feature 1..25: note = Oligonucleotide
  source 1..25: mol_type = other DNA
tgaacccaggaggcggaggtggtgg

SEQ ID NO: 30542 - DNA, 25 bp, synthetic construct
  misc_feature 1..25: note = Oligonucleotide
  source 1..25: mol_type = other DNA
gcttgaacccaggaggcggaggtgg

SEQ ID NO: 30543 - DNA, 25 bp, synthetic construct
  misc_feature 1..25: note = Oligonucleotide
  source 1..25: mol_type = other DNA
attgcttgaacccaggaggcggagg

SEQ ID NO: 30544 - DNA, 25 bp, synthetic construct
  misc_feature 1..25: note = Oligonucleotide
  source 1..25: mol_type = other DNA
agaattgcttgaacccaggaggcgg

SEQ ID NO: 30545 - DNA, 25 bp, synthetic construct
  misc_feature 1..25: note = Oligonucleotide
  source 1..25: mol_type = other DNA
atgagaattgcttgaacccaggagg

SEQ ID NO: 30546 - DNA, 25 bp, synthetic construct
  misc_feature 1..25: note = Oligonucleotide
  source 1..25: mol_type = other DNA
ggcatgagaattgcttgaacccagg

SEQ ID NO: 30547 - DNA, 25 bp, synthetic construct
  misc_feature 1..25: note = Oligonucleotide
  source 1..25: mol_type = other DNA
tgaggcatgagaattgcttgaaccc

SEQ ID NO: 30548 - DNA, 25 bp, synthetic construct
  misc_feature 1..25: note = Oligonucleotide
  source 1..25: mol_type = other DNA
ggctgaggcatgagaattgcttgaa

SEQ ID NO: 30549 - DNA, 25 bp, synthetic construct
  misc_feature 1..25: note = Oligonucleotide
  source 1..25: mol_type = other DNA
ggaggctgaggcatgagaattgctt

SEQ ID NO: 30550 - DNA, 25 bp, synthetic construct
  misc_feature 1..25: note = Oligonucleotide
  source 1..25: mol_type = other DNA
tcaggaggctgaggcatgagaattg

SEQ ID NO: 30551 - DNA, 25 bp, synthetic construct
  misc_feature 1..25: note = Oligonucleotide
  source 1..25: mol_type = other DNA
tactcaggaggctgaggcatgagaa

SEQ ID NO: 30552 - DNA, 25 bp, synthetic construct
  misc_feature 1..25: note = Oligonucleotide
  source 1..25: mol_type = other DNA
agctactcaggaggctgaggcatga

SEQ ID NO: 30553 - DNA, 25 bp, synthetic construct
  misc_feature 1..25: note = Oligonucleotide
  source 1..25: mol_type = other DNA
cccagctactcaggaggctgaggca

SEQ ID NO: 30554 - DNA, 25 bp, synthetic construct
  misc_feature 1..25: note = Oligonucleotide
  source 1..25: mol_type = other DNA
aatcccagctactcaggaggctgag

SEQ ID NO: 30555 - DNA, 25 bp, synthetic construct
  misc_feature 1..25: note = Oligonucleotide
  source 1..25: mol_type = other DNA
tgtaatcccagctactcaggaggct

SEQ ID NO: 30556 - DNA, 25 bp, synthetic construct
  misc_feature 1..25: note = Oligonucleotide
  source 1..25: mol_type = other DNA
gcctgtaatcccagctactcaggag

SEQ ID NO: 30557 - DNA, 25 bp, synthetic construct
  misc_feature 1..25: note = Oligonucleotide
  source 1..25: mol_type = other DNA
catgcctgtaatcccagctactcag

SEQ ID NO: 30558 - DNA, 25 bp, synthetic construct
  misc_feature 1..25: note = Oligonucleotide
  source 1..25: mol_type = other DNA
gtgcatgcctgtaatcccagctact

SEQ ID NO: 30559 - DNA, 25 bp, synthetic construct
  misc_feature 1..25: note = Oligonucleotide
  source 1..25: mol_type = other DNA
gcagtgcatgcctgtaatcccagct

SEQ ID NO: 30560 - DNA, 25 bp, synthetic construct
  misc_feature 1..25: note = Oligonucleotide
  source 1..25: mol_type = other DNA
gtggcagtgcatgcctgtaatccca

SEQ ID NO: 30561 - DNA, 25 bp, synthetic construct
  misc_feature 1..25: note = Oligonucleotide
  source 1..25: mol_type = other DNA
ggtgtggcagtgcatgcctgtaatc

SEQ ID NO: 30562 - DNA, 25 bp, synthetic construct
  misc_feature 1..25: note = Oligonucleotide
  source 1..25: mol_type = other DNA
ccgggtgtggcagtgcatgcctgta

SEQ ID NO: 30563 - DNA, 25 bp, synthetic construct
  misc_feature 1..25: note = Oligonucleotide
  source 1..25: mol_type = other DNA
tggccgggtgtggcagtgcatgcct

SEQ ID NO: 30564 - DNA, 25 bp, synthetic construct
  misc_feature 1..25: note = Oligonucleotide
  source 1..25: mol_type = other DNA
aattggccgggtgtggcagtgcatg

SEQ ID NO: 30565 - DNA, 25 bp, synthetic construct
  misc_feature 1..25: note = Oligonucleotide
  source 1..25: mol_type = other DNA
aaaaattggccgggtgtggcagtgc

SEQ ID NO: 30566 - DNA, 25 bp, synthetic construct
  misc_feature 1..25: note = Oligonucleotide
  source 1..25: mol_type = other DNA
tacaaaaattggccgggtgtggcag

SEQ ID NO: 30567 - DNA, 25 bp, synthetic construct
  misc_feature 1..25: note = Oligonucleotide
  source 1..25: mol_type = other DNA
taatacaaaaattggccgggtgtgg

SEQ ID NO: 30568 - DNA, 25 bp, synthetic construct
  misc_feature 1..25: note = Oligonucleotide
  source 1..25: mol_type = other DNA
taataatacaaaaattggccgggtg

SEQ ID NO: 30569 - DNA, 25 bp, synthetic construct
  misc_feature 1..25: note = Oligonucleotide
  source 1..25: mol_type = other DNA
tactaataatacaaaaattggccgg

SEQ ID NO: 30570 - DNA, 25 bp, synthetic construct
  misc_feature 1..25: note = Oligonucleotide
  source 1..25: mol_type = other DNA
ctctactaataatacaaaaattggc

SEQ ID NO: 30571 - DNA, 25 bp, synthetic construct
  misc_feature 1..25: note = Oligonucleotide
  source 1..25: mol_type = other DNA
cgtctctactaataatacaaaaatt

SEQ ID NO: 30572 - DNA, 25 bp, synthetic construct
  misc_feature 1..25: note = Oligonucleotide
  source 1..25: mol_type = other DNA
ccccgtctctactaataatacaaaa

SEQ ID NO: 30573 - DNA, 25 bp, synthetic construct
  misc_feature 1..25: note = Oligonucleotide
  source 1..25: mol_type = other DNA
aaaccccgtctctactaataataca

SEQ ID NO: 30574 - DNA, 25 bp, synthetic construct
  misc_feature 1..25: note = Oligonucleotide
  source 1..25: mol_type = other DNA
gagaaaccccgtctctactaataat

SEQ ID NO: 30575 - DNA, 25 bp, synthetic construct
  misc_feature 1..25: note = Oligonucleotide
  source 1..25: mol_type = other DNA
atggagaaaccccgtctctactaat

SEQ ID NO: 30576 - DNA, 25 bp, synthetic construct
  misc_feature 1..25: note = Oligonucleotide
  source 1..25: mol_type = other DNA
aacatggagaaaccccgtctctact

SEQ ID NO: 30577 - DNA, 25 bp, synthetic construct
  misc_feature 1..25: note = Oligonucleotide
  source 1..25: mol_type = other DNA
accaacatggagaaaccccgtctct

SEQ ID NO: 30578 - DNA, 25 bp, synthetic construct
  misc_feature 1..25: note = Oligonucleotide
  source 1..25: mol_type = other DNA
ctgaccaacatggagaaaccccgtc

SEQ ID NO: 30579 - DNA, 25 bp, synthetic construct
  misc_feature 1..25: note = Oligonucleotide
  source 1..25: mol_type = other DNA
agcctgaccaacatggagaaacccc

SEQ ID NO: 30580 - DNA, 25 bp, synthetic construct
  misc_feature 1..25: note = Oligonucleotide
  source 1..25: mol_type = other DNA
accagcctgaccaacatggagaaac

SEQ ID NO: 30581 - DNA, 25 bp, synthetic construct
  misc_feature 1..25: note = Oligonucleotide
  source 1..25: mol_type = other DNA
gaaaccagcctgaccaacatggaga

SEQ ID NO: 30582 - DNA, 25 bp, synthetic construct
  misc_feature 1..25: note = Oligonucleotide
  source 1..25: mol_type = other DNA
ttcgaaaccagcctgaccaacatgg

SEQ ID NO: 30583 - DNA, 25 bp, synthetic construct
  misc_feature 1..25: note = Oligonucleotide
  source 1..25: mol_type = other DNA
gagttcgaaaccagcctgaccaaca

SEQ ID NO: 30584 - DNA, 25 bp, synthetic construct
  misc_feature 1..25: note = Oligonucleotide
  source 1..25: mol_type = other DNA
cgggagttcgaaaccagcctgacca

SEQ ID NO: 30585 - DNA, 25 bp, synthetic construct
  misc_feature 1..25: note = Oligonucleotide
  source 1..25: mol_type = other DNA
ggtcgggagttcgaaaccagcctga

SEQ ID NO: 30586 - DNA, 25 bp, synthetic construct
  misc_feature 1..25: note = Oligonucleotide
  source 1..25: mol_type = other DNA
tgaggtcgggagttcgaaaccagcc

SEQ ID NO: 30587 - DNA, 25 bp, synthetic construct
  misc_feature 1..25: note = Oligonucleotide
  source 1..25: mol_type = other DNA
acttgaggtcgggagttcgaaacca

SEQ ID NO: 30588 - DNA, 25 bp, synthetic construct
  misc_feature 1..25: note = Oligonucleotide
  source 1..25: mol_type = other DNA
atcacttgaggtcgggagttcgaaa

SEQ ID NO: 30589 - DNA, 25 bp, synthetic construct
  misc_feature 1..25: note = Oligonucleotide
  source 1..25: mol_type = other DNA
tagatcacttgaggtcgggagttcg

SEQ ID NO: 30590 - DNA, 25 bp, synthetic construct
  misc_feature 1..25: note = Oligonucleotide
  source 1..25: mol_type = other DNA
aggtagatcacttgaggtcgggagt

SEQ ID NO: 30591 - DNA, 25 bp, synthetic construct
  misc_feature 1..25: note = Oligonucleotide
  source 1..25: mol_type = other DNA
ggcaggtagatcacttgaggtcggg

SEQ ID NO: 30592 - DNA, 25 bp, synthetic construct
  misc_feature 1..25: note = Oligonucleotide
  source 1..25: mol_type = other DNA
caaggcaggtagatcacttgaggtc

SEQ ID NO: 30593 - DNA, 25 bp, synthetic construct
  misc_feature 1..25: note = Oligonucleotide
  source 1..25: mol_type = other DNA
ggccaaggcaggtagatcacttgag

SEQ ID NO: 30594 - DNA, 25 bp, synthetic construct
  misc_feature 1..25: note = Oligonucleotide
  source 1..25: mol_type = other DNA
ggaggccaaggcaggtagatcactt

SEQ ID NO: 30595 - DNA, 25 bp, synthetic construct
  misc_feature 1..25: note = Oligonucleotide
  source 1..25: mol_type = other DNA
ttgggaggccaaggcaggtagatca

SEQ ID NO: 30596 - DNA, 25 bp, synthetic construct
  misc_feature 1..25: note = Oligonucleotide
  source 1..25: mol_type = other DNA
actttgggaggccaaggcaggtaga

SEQ ID NO: 30597 - DNA, 25 bp, synthetic construct
  misc_feature 1..25: note = Oligonucleotide
  source 1..25: mol_type = other DNA
agcactttgggaggccaaggcaggt

SEQ ID NO: 30598 - DNA, 25 bp, synthetic construct
  misc_feature 1..25: note = Oligonucleotide
  source 1..25: mol_type = other DNA
cctagcactttgggaggccaaggca

SEQ ID NO: 30599 - DNA, 25 bp, synthetic construct
  misc_feature 1..25: note = Oligonucleotide
  source 1..25: mol_type = other DNA
aatcctagcactttgggaggccaag

SEQ ID NO: 30600 - DNA, 25 bp, synthetic construct
  misc_feature 1..25: note = Oligonucleotide
  source 1..25: mol_type = other DNA
tgtaatcctagcactttgggaggcc

SEQ ID NO: 30601 - DNA, 25 bp, synthetic construct
  misc_feature 1..25: note = Oligonucleotide
  source 1..25: mol_type = other DNA
gcctgtaatcctagcactttgggag

SEQ ID NO: 30602 - DNA, 25 bp, synthetic construct
  misc_feature 1..25: note = Oligonucleotide
  source 1..25: mol_type = other DNA
cacgcctgtaatcctagcactttgg

SEQ ID NO: 30603 - DNA, 25 bp, synthetic construct
  misc_feature 1..25: note = Oligonucleotide
  source 1..25: mol_type = other DNA
gctcacgcctgtaatcctagcactt

SEQ ID NO: 30604 - DNA, 25 bp, synthetic construct
  misc_feature 1..25: note = Oligonucleotide
  source 1..25: mol_type = other DNA
gtggctcacgcctgtaatcctagca

SEQ ID NO: 30605 - DNA, 25 bp, synthetic construct
  misc_feature 1..25: note = Oligonucleotide
  source 1..25: mol_type = other DNA
tcagtggctcacgcctgtaatccta

SEQ ID NO: 30606 - DNA, 25 bp, synthetic construct
  misc_feature 1..25: note = Oligonucleotide
  source 1..25: mol_type = other DNA
ggttcagtggctcacgcctgtaatc

SEQ ID NO: 30607 - DNA, 25 bp, synthetic construct
  misc_feature 1..25: note = Oligonucleotide
  source 1..25: mol_type = other DNA
ccgggttcagtggctcacgcctgta

SEQ ID NO: 30608 - DNA, 25 bp, synthetic construct
  misc_feature 1..25: note = Oligonucleotide
  source 1..25: mol_type = other DNA
aggccgggttcagtggctcacgcct

SEQ ID NO: 30609 - DNA, 25 bp, synthetic construct
  misc_feature 1..25: note = Oligonucleotide
  source 1..25: mol_type = other DNA
agaaggccgggttcagtggctcacg

SEQ ID NO: 30610 - DNA, 25 bp, synthetic construct
  misc_feature 1..25: note = Oligonucleotide
  source 1..25: mol_type = other DNA
aagagaaggccgggttcagtggctc

SEQ ID NO: 30611 - DNA, 25 bp, synthetic construct
  misc_feature 1..25: note = Oligonucleotide
  source 1..25: mol_type = other DNA
aacaagagaaggccgggttcagtgg

SEQ ID NO: 30612 - DNA, 25 bp, synthetic construct
  misc_feature 1..25: note = Oligonucleotide
  source 1..25: mol_type = other DNA
agaaacaagagaaggccgggttcag

SEQ ID NO: 30613 - DNA, 25 bp, synthetic construct
  misc_feature 1..25: note = Oligonucleotide
  source 1..25: mol_type = other DNA
ttaagaaacaagagaaggccgggtt

SEQ ID NO: 30614 - DNA, 25 bp, synthetic construct
  misc_feature 1..25: note = Oligonucleotide
  source 1..25: mol_type = other DNA
atcttaagaaacaagagaaggccgg

SEQ ID NO: 30615 - DNA, 25 bp, synthetic construct
  misc_feature 1..25: note = Oligonucleotide
  source 1..25: mol_type = other DNA
tacatcttaagaaacaagagaaggc

SEQ ID NO: 30616 - DNA, 25 bp, synthetic construct
  misc_feature 1..25: note = Oligonucleotide
  source 1..25: mol_type = other DNA
ttatacatcttaagaaacaagagaa

SEQ ID NO: 30617 - DNA, 25 bp, synthetic construct
  misc_feature 1..25: note = Oligonucleotide
  source 1..25: mol_type = other DNA
taattatacatcttaagaaacaaga

SEQ ID NO: 30618 - DNA, 25 bp, synthetic construct
  misc_feature 1..25: note = Oligonucleotide
  source 1..25: mol_type = other DNA
acctaattatacatcttaagaaaca

SEQ ID NO: 30619 - DNA, 25 bp, synthetic construct
  misc_feature 1..25: note = Oligonucleotide
  source 1..25: mol_type = other DNA
ataacctaattatacatcttaagaa

SEQ ID NO: 30620 - DNA, 25 bp, synthetic construct
  misc_feature 1..25: note = Oligonucleotide
  source 1..25: mol_type = other DNA
tcaataacctaattatacatcttaa

SEQ ID NO: 30621 - DNA, 25 bp, synthetic construct
  misc_feature 1..25: note = Oligonucleotide
  source 1..25: mol_type = other DNA
aaatcaataacctaattatacatct

SEQ ID NO: 30622 - DNA, 25 bp, synthetic construct
  misc_feature 1..25: note = Oligonucleotide
  source 1..25: mol_type = other DNA
ctcaaatcaataacctaattataca

SEQ ID NO: 30623 - DNA, 25 bp, synthetic construct
  misc_feature 1..25: note = Oligonucleotide
  source 1..25: mol_type = other DNA
aatctcaaatcaataacctaattat

SEQ ID NO: 30624 - DNA, 25 bp, synthetic construct
  misc_feature 1..25: note = Oligonucleotide
  source 1..25: mol_type = other DNA
aacaatctcaaatcaataacctaat

SEQ ID NO: 30625 - DNA, 25 bp, synthetic construct
  misc_feature 1..25: note = Oligonucleotide
  source 1..25: mol_type = other DNA
gaaaacaatctcaaatcaataacct

SEQ ID NO: 30626 - DNA, 25 bp, synthetic construct
  misc_feature 1..25: note = Oligonucleotide
  source 1..25: mol_type = other DNA
aaggaaaacaatctcaaatcaataa

SEQ ID NO: 30627 - DNA, 25 bp, synthetic construct
  misc_feature 1..25: note = Oligonucleotide
  source 1..25: mol_type = other DNA
aaaaaggaaaacaatctcaaatcaa

SEQ ID NO: 30628 - DNA, 25 bp, synthetic construct
  misc_feature 1..25: note = Oligonucleotide
  source 1..25: mol_type = other DNA
tttaaaaaggaaaacaatctcaaat

SEQ ID NO: 30629 - DNA, 25 bp, synthetic construct
  misc_feature 1..25: note = Oligonucleotide
  source 1..25: mol_type = other DNA
acttttaaaaaggaaaacaatctca

SEQ ID NO: 30630 - DNA, 25 bp, synthetic construct
  misc_feature 1..25: note = Oligonucleotide
  source 1..25: mol_type = other DNA
cttacttttaaaaaggaaaacaatc

SEQ ID NO: 30631 - DNA, 25 bp, synthetic construct
  misc_feature 1..25: note = Oligonucleotide
  source 1..25: mol_type = other DNA
acacttacttttaaaaaggaaaaca

SEQ ID NO: 30632 - DNA, 25 bp, synthetic construct
  misc_feature 1..25: note = Oligonucleotide
  source 1..25: mol_type = other DNA
taaacacttacttttaaaaaggaaa

SEQ ID NO: 30633 - DNA, 25 bp, synthetic construct
  misc_feature 1..25: note = Oligonucleotide
  source 1..25: mol_type = other DNA
ctgtaaacacttacttttaaaaagg

SEQ ID NO: 30634 - DNA, 25 bp, synthetic construct
  misc_feature 1..25: note = Oligonucleotide
  source 1..25: mol_type = other DNA
acgctgtaaacacttacttttaaaa

SEQ ID NO: 30635 - DNA, 25 bp, synthetic construct
  misc_feature 1..25: note = Oligonucleotide
  source 1..25: mol_type = other DNA
acaacgctgtaaacacttactttta

SEQ ID NO: 30636 - DNA, 25 bp, synthetic construct
  misc_feature 1..25: note = Oligonucleotide
  source 1..25: mol_type = other DNA
gaaacaacgctgtaaacacttactt

SEQ ID NO: 30637 - DNA, 25 bp, synthetic construct
  misc_feature 1..25: note = Oligonucleotide
  source 1..25: mol_type = other DNA
agggaaacaacgctgtaaacactta

SEQ ID NO: 30638 - DNA, 25 bp, synthetic construct
  misc_feature 1..25: note = Oligonucleotide
  source 1..25: mol_type = other DNA
taaagggaaacaacgctgtaaacac

SEQ ID NO: 30639 - DNA, 25 bp, synthetic construct
  misc_feature 1..25: note = Oligonucleotide
  source 1..25: mol_type = other DNA
acttaaagggaaacaacgctgtaaa

SEQ ID NO: 30640 - DNA, 25 bp, synthetic construct
  misc_feature 1..25: note = Oligonucleotide
  source 1..25: mol_type = other DNA
agtacttaaagggaaacaacgctgt

SEQ ID NO: 30641 - DNA, 25 bp, synthetic construct
  misc_feature 1..25: note = Oligonucleotide
  source 1..25: mol_type = other DNA
agcagtacttaaagggaaacaacgc

SEQ ID NO: 30642 - DNA, 25 bp, synthetic construct
  misc_feature 1..25: note = Oligonucleotide
  source 1..25: mol_type = other DNA
aaaagcagtacttaaagggaaacaa

SEQ ID NO: 30643 - DNA, 25 bp, synthetic construct
  misc_feature 1..25: note = Oligonucleotide
  source 1..25: mol_type = other DNA
agcaaaagcagtacttaaagggaaa

SEQ ID NO: 30644 - DNA, 25 bp, synthetic construct
  misc_feature 1..25: note = Oligonucleotide
  source 1..25: mol_type = other DNA
tggagcaaaagcagtacttaaaggg

SEQ ID NO: 30645 - DNA, 25 bp, synthetic construct
  misc_feature 1..25: note = Oligonucleotide
  source 1..25: mol_type = other DNA
atatggagcaaaagcagtacttaaa

SEQ ID NO: 30646 - DNA, 25 bp, synthetic construct
  misc_feature 1..25: note = Oligonucleotide
  source 1..25: mol_type = other DNA
aacatatggagcaaaagcagtactt

SEQ ID NO: 30647 - DNA, 25 bp, synthetic construct
  misc_feature 1..25: note = Oligonucleotide
  source 1..25: mol_type = other DNA
tacaacatatggagcaaaagcagta

SEQ ID NO: 30648 - DNA, 25 bp, synthetic construct
  misc_feature 1..25: note = Oligonucleotide
  source 1..25: mol_type = other DNA
aaatacaacatatggagcaaaagca

SEQ ID NO: 30649 - DNA, 25 bp, synthetic construct
  misc_feature 1..25: note = Oligonucleotide
  source 1..25: mol_type = other DNA
caaaaatacaacatatggagcaaaa

SEQ ID NO: 30650 - DNA, 25 bp, synthetic construct
  misc_feature 1..25: note = Oligonucleotide
  source 1..25: mol_type = other DNA
gaacaaaaatacaacatatggagca

SEQ ID NO: 30651 - DNA, 25 bp, synthetic construct
  misc_feature 1..25: note = Oligonucleotide
  source 1..25: mol_type = other DNA
caagaacaaaaatacaacatatgga

SEQ ID NO: 30652 - DNA, 25 bp, synthetic construct
  misc_feature 1..25: note = Oligonucleotide
  source 1..25: mol_type = other DNA
aaacaagaacaaaaatacaacatat

SEQ ID NO: 30653 - DNA, 25 bp, synthetic construct
  misc_feature 1..25: note = Oligonucleotide
  source 1..25: mol_type = other DNA
gacaaacaagaacaaaaatacaaca

SEQ ID NO: 30654 - DNA, 25 bp, synthetic construct
  misc_feature 1..25: note = Oligonucleotide
  source 1..25: mol_type = other DNA
taagacaaacaagaacaaaaataca

SEQ ID NO: 30655 - DNA, 25 bp, synthetic construct
  misc_feature 1..25: note = Oligonucleotide
  source 1..25: mol_type = other DNA
ctttaagacaaacaagaacaaaaat

SEQ ID NO: 30656 - DNA, 25 bp, synthetic construct
  misc_feature 1..25: note = Oligonucleotide
  source 1..25: mol_type = other DNA
acactttaagacaaacaagaacaaa

SEQ ID NO: 30657 - DNA, 25 bp, synthetic construct
  misc_feature 1..25: note = Oligonucleotide
  source 1..25: mol_type = other DNA
aaaacactttaagacaaacaagaac

SEQ ID NO: 30658 - DNA, 25 bp, synthetic construct
  misc_feature 1..25: note = Oligonucleotide
  source 1..25: mol_type = other DNA
tagaaaacactttaagacaaacaag

SEQ ID NO: 30659 - DNA, 25 bp, synthetic construct
  misc_feature 1..25: note = Oligonucleotide
  source 1..25: mol_type = other DNA
aattagaaaacactttaagacaaac

SEQ ID NO: 30660 - DNA, 25 bp, synthetic construct
  misc_feature 1..25: note = Oligonucleotide
  source 1..25: mol_type = other DNA
gaaaattagaaaacactttaagaca

SEQ ID NO: 30661 - DNA, 25 bp, synthetic construct
  misc_feature 1..25: note = Oligonucleotide
  source 1..25: mol_type = other DNA
aaggaaaattagaaaacactttaag

SEQ ID NO: 30662 - DNA, 25 bp, synthetic construct
  misc_feature 1..25: note = Oligonucleotide
  source 1..25: mol_type = other DNA
cataaggaaaattagaaaacacttt

SEQ ID NO: 30663 - DNA, 25 bp, synthetic construct
  misc_feature 1..25: note = Oligonucleotide
  source 1..25: mol_type = other DNA
aatcataaggaaaattagaaaacac

SEQ ID NO: 30664 - DNA, 25 bp, synthetic construct
  misc_feature 1..25: note = Oligonucleotide
  source 1..25: mol_type = other DNA
atcaatcataaggaaaattagaaaa

SEQ ID NO: 30665 - DNA, 25 bp, synthetic construct
  misc_feature 1..25: note = Oligonucleotide
  source 1..25: mol_type = other DNA
gaaatcaatcataaggaaaattaga

SEQ ID NO: 30666 - DNA, 25 bp, synthetic construct
  misc_feature 1..25: note = Oligonucleotide
  source 1..25: mol_type = other DNA
aaagaaatcaatcataaggaaaatt

SEQ ID NO: 30667 - DNA, 25 bp, synthetic construct
  misc_feature 1..25: note = Oligonucleotide
  source 1..25: mol_type = other DNA
aaaaaagaaatcaatcataaggaaa

SEQ ID NO: 30668 - DNA, 25 bp, synthetic construct
  misc_feature 1..25: note = Oligonucleotide
  source 1..25: mol_type = other DNA
gagaaaaaagaaatcaatcataagg

SEQ ID NO: 30669 - DNA, 25 bp, synthetic construct
  misc_feature 1..25: note = Oligonucleotide
  source 1..25: mol_type = other DNA
aaagagaaaaaagaaatcaatcata

SEQ ID NO: 30670 - DNA, 25 bp, synthetic construct
  misc_feature 1..25: note = Oligonucleotide
  source 1..25: mol_type = other DNA
aagaaagagaaaaaagaaatcaatc

SEQ ID NO: 30671 - DNA, 25 bp, synthetic construct
  misc_feature 1..25: note = Oligonucleotide
  source 1..25: mol_type = other DNA
agaaagaaagagaaaaaagaaatca

SEQ ID NO: 30672 - DNA, 25 bp, synthetic construct
  misc_feature 1..25: note = Oligonucleotide
  source 1..25: mol_type = other DNA
aaaagaaagaaagagaaaaaagaaa

SEQ ID NO: 30673 - DNA, 25 bp, synthetic construct
  misc_feature 1..25: note = Oligonucleotide
  source 1..25: mol_type = other DNA
aaaaaaagaaagaaagagaaaaaag

SEQ ID NO: 30674 - DNA, 25 bp, synthetic construct
  misc_feature 1..25: note = Oligonucleotide
  source 1..25: mol_type = other DNA
aaaaaaaaaagaaagaaagagaaaa

SEQ ID NO: 30675 - DNA, 25 bp, synthetic construct
  misc_feature 1..25: note = Oligonucleotide
  source 1..25: mol_type = other DNA
taaaaaaaaaaaagaaagaaagaga

SEQ ID NO: 30676 - DNA, 25 bp, synthetic construct
  misc_feature 1..25: note = Oligonucleotide
  source 1..25: mol_type = other DNA
tcttaaaaaaaaaaaagaaagaaag

SEQ ID NO: 30677 - DNA, 25 bp, synthetic construct
  misc_feature 1..25: note = Oligonucleotide
  source 1..25: mol_type = other DNA
atctcttaaaaaaaaaaaagaaaga

SEQ ID NO: 30678 - DNA, 25 bp, synthetic construct
  misc_feature 1..25: note = Oligonucleotide
  source 1..25: mol_type = other DNA
cccatctcttaaaaaaaaaaaagaa

SEQ ID NO: 30679 - DNA, 25 bp, synthetic construct
  misc_feature 1..25: note = Oligonucleotide
  source 1..25: mol_type = other DNA
gatcccatctcttaaaaaaaaaaaa

SEQ ID NO: 30680 - DNA, 25 bp, synthetic construct
  misc_feature 1..25: note = Oligonucleotide
  source 1..25: mol_type = other DNA
tgagatcccatctcttaaaaaaaaa

SEQ ID NO: 30681 - DNA, 25 bp, synthetic construct
  misc_feature 1..25: note = Oligonucleotide
  source 1..25: mol_type = other DNA
gagtgagatcccatctcttaaaaaa

SEQ ID NO: 30682 - DNA, 25 bp, synthetic construct
  misc_feature 1..25: note = Oligonucleotide
  source 1..25: mol_type = other DNA
atagagtgagatcccatctcttaaa

SEQ ID NO: 30683 - DNA, 25 bp, synthetic construct
  misc_feature 1..25: note = Oligonucleotide
  source 1..25: mol_type = other DNA
gccatagagtgagatcccatctctt

SEQ ID NO: 30684 - DNA, 25 bp, synthetic construct
  misc_feature 1..25: note = Oligonucleotide
  source 1..25: mol_type = other DNA
tgggccatagagtgagatcccatct

SEQ ID NO: 30685 - DNA, 25 bp, synthetic construct
  misc_feature 1..25: note = Oligonucleotide
  source 1..25: mol_type = other DNA
gcctgggccatagagtgagatccca

SEQ ID NO: 30686 - DNA, 25 bp, synthetic construct
  misc_feature 1..25: note = Oligonucleotide
  source 1..25: mol_type = other DNA
ccagcctgggccatagagtgagatc

SEQ ID NO: 30687 - DNA, 25 bp, synthetic construct
  misc_feature 1..25: note = Oligonucleotide
  source 1..25: mol_type = other DNA
actccagcctgggccatagagtgag

SEQ ID NO: 30688 - DNA, 25 bp, synthetic construct
  misc_feature 1..25: note = Oligonucleotide
  source 1..25: mol_type = other DNA
ggcactccagcctgggccatagagt

SEQ ID NO: 30689 - DNA, 25 bp, synthetic construct
  misc_feature 1..25: note = Oligonucleotide
  source 1..25: mol_type = other DNA
cagggcactccagcctgggccatag

SEQ ID NO: 30690 - DNA, 25 bp, synthetic construct
  misc_feature 1..25: note = Oligonucleotide
  source 1..25: mol_type = other DNA
agccagggcactccagcctgggcca

SEQ ID NO: 30691 - DNA, 25 bp, synthetic construct
  misc_feature 1..25: note = Oligonucleotide
  source 1..25: mol_type = other DNA
tcaagccagggcactccagcctggg

SEQ ID NO: 30692 - DNA, 25 bp, synthetic construct
  misc_feature 1..25: note = Oligonucleotide
  source 1..25: mol_type = other DNA
aaatcaagccagggcactccagcct

SEQ ID NO: 30693 - DNA, 25 bp, synthetic construct
  misc_feature 1..25: note = Oligonucleotide
  source 1..25: mol_type = other DNA
ccaaaatcaagccagggcactccag

SEQ ID NO: 30694 - DNA, 25 bp, synthetic construct
  misc_feature 1..25: note = Oligonucleotide
  source 1..25: mol_type = other DNA
gagccaaaatcaagccagggcactc

SEQ ID NO: 30695 - DNA, 25 bp, synthetic construct
  misc_feature 1..25: note = Oligonucleotide
  source 1..25: mol_type = other DNA
agtgagccaaaatcaagccagggca

SEQ ID NO: 30696 - DNA, 25 bp, synthetic construct
  misc_feature 1..25: note = Oligonucleotide
  source 1..25: mol_type = other DNA
tgcagtgagccaaaatcaagccagg

SEQ ID NO: 30697 - DNA, 25 bp, synthetic construct
  misc_feature 1..25: note = Oligonucleotide
  source 1..25: mol_type = other DNA
ggctgcagtgagccaaaatcaagcc

SEQ ID NO: 30698 - DNA, 25 bp, synthetic construct
  misc_feature 1..25: note = Oligonucleotide
  source 1..25: mol_type = other DNA
tgaggctgcagtgagccaaaatcaa

SEQ ID NO: 30699 - DNA, 25 bp, synthetic construct
  misc_feature 1..25: note = Oligonucleotide
  source 1..25: mol_type = other DNA
ggttgaggctgcagtgagccaaaat

SEQ ID NO: 30700 - DNA, 25 bp, synthetic construct
  misc_feature 1..25: note = Oligonucleotide
  source 1..25: mol_type = other DNA
ggaggttgaggctgcagtgagccaa

SEQ ID NO: 30701 - DNA, 25 bp, synthetic construct
  misc_feature 1..25: note = Oligonucleotide
  source 1..25: mol_type = other DNA
ctaggaggttgaggctgcagtgagc

SEQ ID NO: 30702 - DNA, 25 bp, synthetic construct
  misc_feature 1..25: note = Oligonucleotide
  source 1..25: mol_type = other DNA
agactaggaggttgaggctgcagtg

SEQ ID NO: 30703 - DNA, 25 bp, synthetic construct
  misc_feature 1..25: note = Oligonucleotide
  source 1..25: mol_type = other DNA
ttgagactaggaggttgaggctgca

SEQ ID NO: 30704 - DNA, 25 bp, synthetic construct
  misc_feature 1..25: note = Oligonucleotide
  source 1..25: mol_type = other DNA
ggcttgagactaggaggttgaggct

SEQ ID NO: 30705 - DNA, 25 bp, synthetic construct
  misc_feature 1..25: note = Oligonucleotide
  source 1..25: mol_type = other DNA
gatggcttgagactaggaggttgag

SEQ ID NO: 30706 - DNA, 25 bp, synthetic construct
  misc_feature 1..25: note = Oligonucleotide
  source 1..25: mol_type = other DNA
gaggatggcttgagactaggaggtt

SEQ ID NO: 30707 - DNA, 25 bp, synthetic construct
  misc_feature 1..25: note = Oligonucleotide
  source 1..25: mol_type = other DNA
tgggaggatggcttgagactaggag

SEQ ID NO: 30708 - DNA, 25 bp, synthetic construct
  misc_feature 1..25: note = Oligonucleotide
  source 1..25: mol_type = other DNA
aggtgggaggatggcttgagactag

SEQ ID NO: 30709 - DNA, 25 bp, synthetic construct
  misc_feature 1..25: note = Oligonucleotide
  source 1..25: mol_type = other DNA
ctgaggtgggaggatggcttgagac

SEQ ID NO: 30710 - DNA, 25 bp, synthetic construct
  misc_feature 1..25: note = Oligonucleotide
  source 1..25: mol_type = other DNA
aagctgaggtgggaggatggcttga

SEQ ID NO: 30711 - DNA, 25 bp, synthetic construct
  misc_feature 1..25: note = Oligonucleotide
  source 1..25: mol_type = other DNA
aggaagctgaggtgggaggatggct

SEQ ID NO: 30712 - DNA, 25 bp, synthetic construct
  misc_feature 1..25: note = Oligonucleotide
  source 1..25: mol_type = other DNA
ctcaggaagctgaggtgggaggatg

SEQ ID NO: 30713 - DNA, 25 bp, synthetic construct
  misc_feature 1..25: note = Oligonucleotide
  source 1..25: mol_type = other DNA
ctactcaggaagctgaggtgggagg

SEQ ID NO: 30714 - DNA, 25 bp, synthetic construct
  misc_feature 1..25: note = Oligonucleotide
  source 1..25: mol_type = other DNA
cagctactcaggaagctgaggtggg

SEQ ID NO: 30715 - DNA, 25 bp, synthetic construct
  misc_feature 1..25: note = Oligonucleotide
  source 1..25: mol_type = other DNA
ttacagctactcaggaagctgaggt

SEQ ID NO: 30716 - DNA, 25 bp, synthetic construct
  misc_feature 1..25: note = Oligonucleotide
  source 1..25: mol_type = other DNA
tagttacagctactcaggaagctga

SEQ ID NO: 30717 - DNA, 25 bp, synthetic construct
  misc_feature 1..25: note = Oligonucleotide
  source 1..25: mol_type = other DNA
ctgtagttacagctactcaggaagc

SEQ ID NO: 30718 - DNA, 25 bp, synthetic construct
  misc_feature 1..25: note = Oligonucleotide
  source 1..25: mol_type = other DNA
accctgtagttacagctactcagga

SEQ ID NO: 30719 - DNA, 25 bp, synthetic construct
  misc_feature 1..25: note = Oligonucleotide
  source 1..25: mol_type = other DNA
tgcaccctgtagttacagctactca

SEQ ID NO: 30720 - DNA, 25 bp, synthetic construct
  misc_feature 1..25: note = Oligonucleotide
  source 1..25: mol_type = other DNA
tgctgcaccctgtagttacagctac

SEQ ID NO: 30721 - DNA, 25 bp, synthetic construct
  misc_feature 1..25: note = Oligonucleotide
  source 1..25: mol_type = other DNA
tggtgctgcaccctgtagttacagc

SEQ ID NO: 30722 - DNA, 25 bp, synthetic construct
  misc_feature 1..25: note = Oligonucleotide
  source 1..25: mol_type = other DNA
gtgtggtgctgcaccctgtagttac

SEQ ID NO: 30723 - DNA, 25 bp, synthetic construct
  misc_feature 1..25: note = Oligonucleotide
  source 1..25: mol_type = other DNA
caggtgtggtgctgcaccctgtagt

SEQ ID NO: 30724 - DNA, 25 bp, synthetic construct
  misc_feature 1..25: note = Oligonucleotide
  source 1..25: mol_type = other DNA
agccaggtgtggtgctgcaccctgt

SEQ ID NO: 30725 - DNA, 25 bp, synthetic construct
  misc_feature 1..25: note = Oligonucleotide
  source 1..25: mol_type = other DNA
aaaagccaggtgtggtgctgcaccc

SEQ ID NO: 30726 - DNA, 25 bp, synthetic construct
  misc_feature 1..25: note = Oligonucleotide
  source 1..25: mol_type = other DNA
agaaaaagccaggtgtggtgctgca

SEQ ID NO: 30727 - DNA, 25 bp, synthetic construct
  misc_feature 1..25: note = Oligonucleotide
  source 1..25: mol_type = other DNA
aatagaaaaagccaggtgtggtgct

SEQ ID NO: 30728 - DNA, 25 bp, synthetic construct
  misc_feature 1..25: note = Oligonucleotide
  source 1..25: mol_type = other DNA
aaaaatagaaaaagccaggtgtggt

SEQ ID NO: 30729 - DNA, 25 bp, synthetic construct
  misc_feature 1..25: note = Oligonucleotide
  source 1..25: mol_type = other DNA
ataaaaaatagaaaaagccaggtgt

SEQ ID NO: 30730 - DNA, 25 bp, synthetic construct
  misc_feature 1..25: note = Oligonucleotide
  source 1..25: mol_type = other DNA
tctataaaaaatagaaaaagccagg

SEQ ID NO: 30731 - DNA, 25 bp, synthetic construct
  misc_feature 1..25: note = Oligonucleotide
  source 1..25: mol_type = other DNA
atctctataaaaaatagaaaaagcc

SEQ ID NO: 30732 - DNA, 25 bp, synthetic construct
  misc_feature 1..25: note = Oligonucleotide
  source 1..25: mol_type = other DNA
cccatctctataaaaaatagaaaaa

SEQ ID NO: 30733 - DNA, 25 bp, synthetic construct
  misc_feature 1..25: note = Oligonucleotide
  source 1..25: mol_type = other DNA
acccccatctctataaaaaatagaa

SEQ ID NO: 30734 - DNA, 25 bp, synthetic construct
  misc_feature 1..25: note = Oligonucleotide
  source 1..25: mol_type = other DNA
gacacccccatctctataaaaaata

SEQ ID NO: 30735 - DNA, 25 bp, synthetic construct
  misc_feature 1..25: note = Oligonucleotide
  source 1..25: mol_type = other DNA
agtgacacccccatctctataaaaa

SEQ ID NO: 30736 - DNA, 25 bp, synthetic construct
  misc_feature 1..25: note = Oligonucleotide
  source 1..25: mol_type = other DNA
catagtgacacccccatctctataa

SEQ ID NO: 30737 - DNA, 25 bp, synthetic construct
  misc_feature 1..25: note = Oligonucleotide
  source 1..25: mol_type = other DNA
caacatagtgacacccccatctcta

SEQ ID NO: 30738 - DNA, 25 bp, synthetic construct
  misc_feature 1..25: note = Oligonucleotide
  source 1..25: mol_type = other DNA
ggacaacatagtgacacccccatct

SEQ ID NO: 30739 - DNA, 25 bp, synthetic construct
  misc_feature 1..25: note = Oligonucleotide
  source 1..25: mol_type = other DNA
cctggacaacatagtgacaccccca

SEQ ID NO: 30740 - DNA, 25 bp, synthetic construct
  misc_feature 1..25: note = Oligonucleotide
  source 1..25: mol_type = other DNA
cagcctggacaacatagtgacaccc

SEQ ID NO: 30741 - DNA, 25 bp, synthetic construct
  misc_feature 1..25: note = Oligonucleotide
  source 1..25: mol_type = other DNA
gaccagcctggacaacatagtgaca

SEQ ID NO: 30742 - DNA, 25 bp, synthetic construct
  misc_feature 1..25: note = Oligonucleotide
  source 1..25: mol_type = other DNA
tgagaccagcctggacaacatagtg

SEQ ID NO: 30743 - DNA, 25 bp, synthetic construct
  misc_feature 1..25: note = Oligonucleotide
  source 1..25: mol_type = other DNA
gtttgagaccagcctggacaacata

SEQ ID NO: 30744 - DNA, 25 bp, synthetic construct
  misc_feature 1..25: note = Oligonucleotide
  source 1..25: mol_type = other DNA
ggagtttgagaccagcctggacaac

SEQ ID NO: 30745 - DNA, 25 bp, synthetic construct
  misc_feature 1..25: note = Oligonucleotide
  source 1..25: mol_type = other DNA
tcaggagtttgagaccagcctggac

SEQ ID NO: 30746 - DNA, 25 bp, synthetic construct
  misc_feature 1..25: note = Oligonucleotide
  source 1..25: mol_type = other DNA
aagtcaggagtttgagaccagcctg

SEQ ID NO: 30747 - DNA, 25 bp, synthetic construct
  misc_feature 1..25: note = Oligonucleotide
  source 1..25: mol_type = other DNA
ttgaagtcaggagtttgagaccagc

SEQ ID NO: 30748 - DNA, 25 bp, synthetic construct
  misc_feature 1..25: note = Oligonucleotide
  source 1..25: mol_type = other DNA
cacttgaagtcaggagtttgagacc

SEQ ID NO: 30749 - DNA, 25 bp, synthetic construct
  misc_feature 1..25: note = Oligonucleotide
  source 1..25: mol_type = other DNA
gatcacttgaagtcaggagtttgag

SEQ ID NO: 30750 - DNA, 25 bp, synthetic construct
  misc_feature 1..25: note = Oligonucleotide
  source 1..25: mol_type = other DNA
gaggatcacttgaagtcaggagttt

SEQ ID NO: 30751 - DNA, 25 bp, synthetic construct
  misc_feature 1..25: note = Oligonucleotide
  source 1..25: mol_type = other DNA
caggaggatcacttgaagtcaggag

SEQ ID NO: 30752 - DNA, 25 bp, synthetic construct
  misc_feature 1..25: note = Oligonucleotide
  source 1..25: mol_type = other DNA
aggcaggaggatcacttgaagtcag

SEQ ID NO: 30753 - DNA, 25 bp, synthetic construct
  misc_feature 1..25: note = Oligonucleotide
  source 1..25: mol_type = other DNA
tcaaggcaggaggatcacttgaagt

SEQ ID NO: 30754 - DNA, 25 bp, synthetic construct
  misc_feature 1..25: note = Oligonucleotide
  source 1..25: mol_type = other DNA
aggtcaaggcaggaggatcacttga

SEQ ID NO: 30755 - DNA, 25 bp, synthetic construct
  misc_feature 1..25: note = Oligonucleotide
  source 1..25: mol_type = other DNA
gggaggtcaaggcaggaggatcact

SEQ ID NO: 30756 - DNA, 25 bp, synthetic construct
  misc_feature 1..25: note = Oligonucleotide
  source 1..25: mol_type = other DNA
tttgggaggtcaaggcaggaggatc

SEQ ID NO: 30757 - DNA, 25 bp, synthetic construct
  misc_feature 1..25: note = Oligonucleotide
  source 1..25: mol_type = other DNA
cactttgggaggtcaaggcaggagg

SEQ ID NO: 30758 - DNA, 25 bp, synthetic construct
  misc_feature 1..25: note = Oligonucleotide
  source 1..25: mol_type = other DNA
cagcactttgggaggtcaaggcagg

SEQ ID NO: 30759 - DNA, 25 bp, synthetic construct
  misc_feature 1..25: note = Oligonucleotide
  source 1..25: mol_type = other DNA
tcccagcactttgggaggtcaaggc

SEQ ID NO: 30760 - DNA, 25 bp, synthetic construct
  misc_feature 1..25: note = Oligonucleotide
  source 1..25: mol_type = other DNA
taatcccagcactttgggaggtcaa

SEQ ID NO: 30761 - DNA, 25 bp, synthetic construct
  misc_feature 1..25: note = Oligonucleotide
  source 1..25: mol_type = other DNA
ctataatcccagcactttgggaggt

SEQ ID NO: 30762 - DNA, 25 bp, synthetic construct
  misc_feature 1..25: note = Oligonucleotide
  source 1..25: mol_type = other DNA
agcctataatcccagcactttggga

SEQ ID NO: 30763 - DNA, 25 bp, synthetic construct
  misc_feature 1..25: note = Oligonucleotide
  source 1..25: mol_type = other DNA
tcaagcctataatcccagcactttg

SEQ ID NO: 30764 - DNA, 25 bp, synthetic construct
  misc_feature 1..25: note = Oligonucleotide
  source 1..25: mol_type = other DNA
ggctcaagcctataatcccagcact

SEQ ID NO: 30765 - DNA, 25 bp, synthetic construct
  misc_feature 1..25: note = Oligonucleotide
  source 1..25: mol_type = other DNA
ggtggctcaagcctataatcccagc

SEQ ID NO: 30766 - DNA, 25 bp, synthetic construct
  misc_feature 1..25: note = Oligonucleotide
  source 1..25: mol_type = other DNA
aatggtggctcaagcctataatccc

SEQ ID NO: 30767 - DNA, 25 bp, synthetic construct
  misc_feature 1..25: note = Oligonucleotide
  source 1..25: mol_type = other DNA
agaaatggtggctcaagcctataat

SEQ ID NO: 30768 - DNA, 25 bp, synthetic construct
  misc_feature 1..25: note = Oligonucleotide
  source 1..25: mol_type = other DNA
aaaagaaatggtggctcaagcctat

SEQ ID NO: 30769 - DNA, 25 bp, synthetic construct
  misc_feature 1..25: note = Oligonucleotide
  source 1..25: mol_type = other DNA
caaaaaagaaatggtggctcaagcc

SEQ ID NO: 30770 - DNA, 25 bp, synthetic construct
  misc_feature 1..25: note = Oligonucleotide
  source 1..25: mol_type = other DNA
gctcaaaaaagaaatggtggctcaa

SEQ ID NO: 30771 - DNA, 25 bp, synthetic construct
  misc_feature 1..25: note = Oligonucleotide
  source 1..25: mol_type = other DNA
caggctcaaaaaagaaatggtggct

SEQ ID NO: 30772 - DNA, 25 bp, synthetic construct
  misc_feature 1..25: note = Oligonucleotide
  source 1..25: mol_type = other DNA
aaccaggctcaaaaaagaaatggtg

SEQ ID NO: 30773 - DNA, 25 bp, synthetic construct
  misc_feature 1..25: note = Oligonucleotide
  source 1..25: mol_type = other DNA
agaaaccaggctcaaaaaagaaatg

SEQ ID NO: 30774 - DNA, 25 bp, synthetic construct
  misc_feature 1..25: note = Oligonucleotide
  source 1..25: mol_type = other DNA
aaaagaaaccaggctcaaaaaagaa

SEQ ID NO: 30775 - DNA, 25 bp, synthetic construct
  misc_feature 1..25: note = Oligonucleotide
  source 1..25: mol_type = other DNA
caaaaaagaaaccaggctcaaaaaa

SEQ ID NO: 30776 - DNA, 25 bp, synthetic construct
  misc_feature 1..25: note = Oligonucleotide
  source 1..25: mol_type = other DNA
tgtcaaaaaagaaaccaggctcaaa

SEQ ID NO: 30777 - DNA, 25 bp, synthetic construct
  misc_feature 1..25: note = Oligonucleotide
  source 1..25: mol_type = other DNA
atgtgtcaaaaaagaaaccaggctc

SEQ ID NO: 30778 - DNA, 25 bp, synthetic construct
  misc_feature 1..25: note = Oligonucleotide
  source 1..25: mol_type = other DNA
ccaatgtgtcaaaaaagaaaccagg

SEQ ID NO: 30779 - DNA, 25 bp, synthetic construct
  misc_feature 1..25: note = Oligonucleotide
  source 1..25: mol_type = other DNA
caaccaatgtgtcaaaaaagaaacc

SEQ ID NO: 30780 - DNA, 25 bp, synthetic construct
  misc_feature 1..25: note = Oligonucleotide
  source 1..25: mol_type = other DNA
aagcaaccaatgtgtcaaaaaagaa

SEQ ID NO: 30781 - DNA, 25 bp, synthetic construct
  misc_feature 1..25: note = Oligonucleotide
  source 1..25: mol_type = other DNA
cctaagcaaccaatgtgtcaaaaaa

SEQ ID NO: 30782 - DNA, 25 bp, synthetic construct
  misc_feature 1..25: note = Oligonucleotide
  source 1..25: mol_type = other DNA
actcctaagcaaccaatgtgtcaaa

SEQ ID NO: 30783 - DNA, 25 bp, synthetic construct
  misc_feature 1..25: note = Oligonucleotide
  source 1..25: mol_type = other DNA
catactcctaagcaaccaatgtgtc

SEQ ID NO: 30784 - DNA, 25 bp, synthetic construct
  misc_feature 1..25: note = Oligonucleotide
  source 1..25: mol_type = other DNA
caccatactcctaagcaaccaatgt

SEQ ID NO: 30785 - DNA, 25 bp, synthetic construct
  misc_feature 1..25: note = Oligonucleotide
  source 1..25: mol_type = other DNA
aaacaccatactcctaagcaaccaa

SEQ ID NO: 30786 - DNA, 25 bp, synthetic construct
  misc_feature 1..25: note = Oligonucleotide
  source 1..25: mol_type = other DNA
attaaacaccatactcctaagcaac

SEQ ID NO: 30787 - DNA, 25 bp, synthetic construct
  misc_feature 1..25: note = Oligonucleotide
  source 1..25: mol_type = other DNA
gaaattaaacaccatactcctaagc

SEQ ID NO: 30788 - DNA, 25 bp, synthetic construct
  misc_feature 1..25: note = Oligonucleotide
  source 1..25: mol_type = other DNA
gtggaaattaaacaccatactccta

SEQ ID NO: 30789 - DNA, 25 bp, synthetic construct
  misc_feature 1..25: note = Oligonucleotide
  source 1..25: mol_type = other DNA
tatgtggaaattaaacaccatactc

SEQ ID NO: 30790 - DNA, 25 bp, synthetic construct
  misc_feature 1..25: note = Oligonucleotide
  source 1..25: mol_type = other DNA
aaatatgtggaaattaaacaccata

SEQ ID NO: 30791 - DNA, 25 bp, synthetic construct
  misc_feature 1..25: note = Oligonucleotide
  source 1..25: mol_type = other DNA
cacaaatatgtggaaattaaacacc

SEQ ID NO: 30792 - DNA, 25 bp, synthetic construct
  misc_feature 1..25: note = Oligonucleotide
  source 1..25: mol_type = other DNA
attcacaaatatgtggaaattaaac

SEQ ID NO: 30793 - DNA, 25 bp, synthetic construct
  misc_feature 1..25: note = Oligonucleotide
  source 1..25: mol_type = other DNA
aaaattcacaaatatgtggaaatta

SEQ ID NO: 30794 - DNA, 25 bp, synthetic construct
  misc_feature 1..25: note = Oligonucleotide
  source 1..25: mol_type = other DNA
tggaaaattcacaaatatgtggaaa

SEQ ID NO: 30795 - DNA, 25 bp, synthetic construct
  misc_feature 1..25: note = Oligonucleotide
  source 1..25: mol_type = other DNA
aactggaaaattcacaaatatgtgg

SEQ ID NO: 30796 - DNA, 25 bp, synthetic construct
  misc_feature 1..25: note = Oligonucleotide
  source 1..25: mol_type = other DNA
gaaaactggaaaattcacaaatatg

SEQ ID NO: 30797 - DNA, 25 bp, synthetic construct
  misc_feature 1..25: note = Oligonucleotide
  source 1..25: mol_type = other DNA
aaagaaaactggaaaattcacaaat

SEQ ID NO: 30798 - DNA, 25 bp, synthetic construct
  misc_feature 1..25: note = Oligonucleotide
  source 1..25: mol_type = other DNA
gtgaaagaaaactggaaaattcaca

SEQ ID NO: 30799 - DNA, 25 bp, synthetic construct
  misc_feature 1..25: note = Oligonucleotide
  source 1..25: mol_type = other DNA
gaagtgaaagaaaactggaaaattc

SEQ ID NO: 30800 - DNA, 25 bp, synthetic construct
  misc_feature 1..25: note = Oligonucleotide
  source 1..25: mol_type = other DNA
cgagaagtgaaagaaaactggaaaa

SEQ ID NO: 30801 - DNA, 25 bp, synthetic construct
  misc_feature 1..25: note = Oligonucleotide
  source 1..25: mol_type = other DNA
aatcgagaagtgaaagaaaactgga

SEQ ID NO: 30802 - DNA, 25 bp, synthetic construct
  misc_feature 1..25: note = Oligonucleotide
  source 1..25: mol_type = other DNA
agaaatcgagaagtgaaagaaaact

SEQ ID NO: 30803 - DNA, 25 bp, synthetic construct
  misc_feature 1..25: note = Oligonucleotide
  source 1..25: mol_type = other DNA
gctagaaatcgagaagtgaaagaaa

SEQ ID NO: 30804 - DNA, 25 bp, synthetic construct
  misc_feature 1..25: note = Oligonucleotide
  source 1..25: mol_type = other DNA
aaagctagaaatcgagaagtgaaag

SEQ ID NO: 30805 - DNA, 25 bp, synthetic construct
  misc_feature 1..25: note = Oligonucleotide
  source 1..25: mol_type = other DNA
aacaaagctagaaatcgagaagtga

SEQ ID NO: 30806 - DNA, 25 bp, synthetic construct
  misc_feature 1..25: note = Oligonucleotide
  source 1..25: mol_type = other DNA
cgaaacaaagctagaaatcgagaag

SEQ ID NO: 30807 - DNA, 25 bp, synthetic construct
  misc_feature 1..25: note = Oligonucleotide
  source 1..25: mol_type = other DNA
caacgaaacaaagctagaaatcgag

SEQ ID NO: 30808 - DNA, 25 bp, synthetic construct
  misc_feature 1..25: note = Oligonucleotide
  source 1..25: mol_type = other DNA
ccacaacgaaacaaagctagaaatc

SEQ ID NO: 30809 - DNA, 25 bp, synthetic construct
  misc_feature 1..25: note = Oligonucleotide
  source 1..25: mol_type = other DNA
caaccacaacgaaacaaagctagaa

SEQ ID NO: 30810 - DNA, 25 bp, synthetic construct
  misc_feature 1..25: note = Oligonucleotide
  source 1..25: mol_type = other DNA
tttcaaccacaacgaaacaaagcta

SEQ ID NO: 30811 - DNA, 25 bp, synthetic construct
  misc_feature 1..25: note = Oligonucleotide
  source 1..25: mol_type = other DNA
ctttttcaaccacaacgaaacaaag

SEQ ID NO: 30812 - DNA, 25 bp, synthetic construct
  misc_feature 1..25: note = Oligonucleotide
  source 1..25: mol_type = other DNA
tatctttttcaaccacaacgaaaca

SEQ ID NO: 30813 - DNA, 25 bp, synthetic construct
  misc_feature 1..25: note = Oligonucleotide
  source 1..25: mol_type = other DNA
aagtatctttttcaaccacaacgaa

SEQ ID NO: 30814 - DNA, 25 bp, synthetic construct
  misc_feature 1..25: note = Oligonucleotide
  source 1..25: mol_type = other DNA
acaaagtatctttttcaaccacaac

SEQ ID NO: 30815 - DNA, 25 bp, synthetic construct
  misc_feature 1..25: note = Oligonucleotide
  source 1..25: mol_type = other DNA
catacaaagtatctttttcaaccac

SEQ ID NO: 30816 - DNA, 25 bp, synthetic construct
  misc_feature 1..25: note = Oligonucleotide
  source 1..25: mol_type = other DNA
aatcatacaaagtatctttttcaac

SEQ ID NO: 30817 - DNA, 25 bp, synthetic construct
  misc_feature 1..25: note = Oligonucleotide
  source 1..25: mol_type = other DNA
tgaaatcatacaaagtatctttttc

SEQ ID NO: 30818 - DNA, 25 bp, synthetic construct
  misc_feature 1..25: note = Oligonucleotide
  source 1..25: mol_type = other DNA
gactgaaatcatacaaagtatcttt

SEQ ID NO: 30819 - DNA, 25 bp, synthetic construct
  misc_feature 1..25: note = Oligonucleotide
  source 1..25: mol_type = other DNA
aaagactgaaatcatacaaagtatc

SEQ ID NO: 30820 - DNA, 25 bp, synthetic construct
  misc_feature 1..25: note = Oligonucleotide
  source 1..25: mol_type = other DNA
ttaaaagactgaaatcatacaaagt

SEQ ID NO: 30821 - DNA, 25 bp, synthetic construct
  misc_feature 1..25: note = Oligonucleotide
  source 1..25: mol_type = other DNA
gttttaaaagactgaaatcatacaa

SEQ ID NO: 30822 - DNA, 25 bp, synthetic construct
  misc_feature 1..25: note = Oligonucleotide
  source 1..25: mol_type = other DNA
aaagttttaaaagactgaaatcata

SEQ ID NO: 30823 - DNA, 25 bp, synthetic construct
  misc_feature 1..25: note = Oligonucleotide
  source 1..25: mol_type = other DNA
gataaagttttaaaagactgaaatc

SEQ ID NO: 30824 - DNA, 25 bp, synthetic construct
  misc_feature 1..25: note = Oligonucleotide
  source 1..25: mol_type = other DNA
cttgataaagttttaaaagactgaa

SEQ ID NO: 30825 - DNA, 25 bp, synthetic construct
  misc_feature 1..25: note = Oligonucleotide
  source 1..25: mol_type = other DNA
agtcttgataaagttttaaaagact

SEQ ID NO: 30826 - DNA, 25 bp, synthetic construct
  misc_feature 1..25: note = Oligonucleotide
  source 1..25: mol_type = other DNA
acaagtcttgataaagttttaaaag

SEQ ID NO: 30827 - DNA, 25 bp, synthetic construct
  misc_feature 1..25: note = Oligonucleotide
  source 1..25: mol_type = other DNA
aaaacaagtcttgataaagttttaa

SEQ ID NO: 30828 - DNA, 25 bp, synthetic construct
  misc_feature 1..25: note = Oligonucleotide
  source 1..25: mol_type = other DNA
cgcaaaacaagtcttgataaagttt

SEQ ID NO: 30829 - DNA, 25 bp, synthetic construct
  misc_feature 1..25: note = Oligonucleotide
  source 1..25: mol_type = other DNA
ggccgcaaaacaagtcttgataaag

SEQ ID NO: 30830 - DNA, 25 bp, synthetic construct
  misc_feature 1..25: note = Oligonucleotide
  source 1..25: mol_type = other DNA
tttggccgcaaaacaagtcttgata

SEQ ID NO: 30831 - DNA, 25 bp, synthetic construct
  misc_feature 1..25: note = Oligonucleotide
  source 1..25: mol_type = other DNA
atgtttggccgcaaaacaagtcttg

SEQ ID NO: 30832 - DNA, 25 bp, synthetic construct
  misc_feature 1..25: note = Oligonucleotide
  source 1..25: mol_type = other DNA
tgtatgtttggccgcaaaacaagtc

SEQ ID NO: 30833 - DNA, 25 bp, synthetic construct
  misc_feature 1..25: note = Oligonucleotide
  source 1..25: mol_type = other DNA
gactgtatgtttggccgcaaaacaa

SEQ ID NO: 30834 - DNA, 25 bp, synthetic construct
  misc_feature 1..25: note = Oligonucleotide
  source 1..25: mol_type = other DNA
acagactgtatgtttggccgcaaaa

SEQ ID NO: 30835 - DNA, 25 bp, synthetic construct
  misc_feature 1..25: note = Oligonucleotide
  source 1..25: mol_type = other DNA
cagacagactgtatgtttggccgca

SEQ ID NO: 30836 - DNA, 25 bp, synthetic construct
  misc_feature 1..25: note = Oligonucleotide
  source 1..25: mol_type = other DNA
tcccagacagactgtatgtttggcc

SEQ ID NO: 30837 - DNA, 25 bp, synthetic construct
  misc_feature 1..25: note = Oligonucleotide
  source 1..25: mol_type = other DNA
ttctcccagacagactgtatgtttg

SEQ ID NO: 30838 - DNA, 25 bp, synthetic construct
  misc_feature 1..25: note = Oligonucleotide
  source 1..25: mol_type = other DNA
acattctcccagacagactgtatgt

SEQ ID NO: 30839 - DNA, 25 bp, synthetic construct
  misc_feature 1..25: note = Oligonucleotide
  source 1..25: mol_type = other DNA
ggaacattctcccagacagactgta

SEQ ID NO: 30840 - DNA, 25 bp, synthetic construct
  misc_feature 1..25: note = Oligonucleotide
  source 1..25: mol_type = other DNA
catggaacattctcccagacagact

SEQ ID NO: 30841 - DNA, 25 bp, synthetic construct
  misc_feature 1..25: note = Oligonucleotide
  source 1..25: mol_type = other DNA
acacatggaacattctcccagacag

SEQ ID NO: 30842 - DNA, 25 bp, synthetic construct
  misc_feature 1..25: note = Oligonucleotide
  source 1..25: mol_type = other DNA
agtacacatggaacattctcccaga

SEQ ID NO: 30843 - DNA, 25 bp, synthetic construct
  misc_feature 1..25: note = Oligonucleotide
  source 1..25: mol_type = other DNA
tcgagtacacatggaacattctccc

SEQ ID NO: 30844 - DNA, 25 bp, synthetic construct
  misc_feature 1..25: note = Oligonucleotide
  source 1..25: mol_type = other DNA
ttctcgagtacacatggaacattct

SEQ ID NO: 30845 - DNA, 25 bp, synthetic construct
  misc_feature 1..25: note = Oligonucleotide
  source 1..25: mol_type = other DNA
ttcttctcgagtacacatggaacat

SEQ ID NO: 30846 - DNA, 25 bp, synthetic construct
  misc_feature 1..25: note = Oligonucleotide
  source 1..25: mol_type = other DNA
gaattcttctcgagtacacatggaa

SEQ ID NO: 30847 - DNA, 25 bp, synthetic construct
  misc_feature 1..25: note = Oligonucleotide
  source 1..25: mol_type = other DNA
caagaattcttctcgagtacacatg

SEQ ID NO: 30848 - DNA, 25 bp, synthetic construct
  misc_feature 1..25: note = Oligonucleotide
  source 1..25: mol_type = other DNA
attcaagaattcttctcgagtacac

SEQ ID NO: 30849 - DNA, 25 bp, synthetic construct
  misc_feature 1..25: note = Oligonucleotide
  source 1..25: mol_type = other DNA
tatattcaagaattcttctcgagta

SEQ ID NO: 30850 - DNA, 25 bp, synthetic construct
  misc_feature 1..25: note = Oligonucleotide
  source 1..25: mol_type = other DNA
gaatatattcaagaattcttctcga

SEQ ID NO: 30851 - DNA, 25 bp, synthetic construct
  misc_feature 1..25: note = Oligonucleotide
  source 1..25: mol_type = other DNA
gcagaatatattcaagaattcttct

SEQ ID NO: 30852 - DNA, 25 bp, synthetic construct
  misc_feature 1..25: note = Oligonucleotide
  source 1..25: mol_type = other DNA
agagcagaatatattcaagaattct

SEQ ID NO: 30853 - DNA, 25 bp, synthetic construct
  misc_feature 1..25: note = Oligonucleotide
  source 1..25: mol_type = other DNA
acaagagcagaatatattcaagaat

SEQ ID NO: 30854 - DNA, 25 bp, synthetic construct
  misc_feature 1..25: note = Oligonucleotide
  source 1..25: mol_type = other DNA
ccaacaagagcagaatatattcaag

SEQ ID NO: 30855 - DNA, 25 bp, synthetic construct
  misc_feature 1..25: note = Oligonucleotide
  source 1..25: mol_type = other DNA
cacccaacaagagcagaatatattc

SEQ ID NO: 30856 - DNA, 25 bp, synthetic construct
  misc_feature 1..25: note = Oligonucleotide
  source 1..25: mol_type = other DNA
tgccacccaacaagagcagaatata

SEQ ID NO: 30857 - DNA, 25 bp, synthetic construct
  misc_feature 1..25: note = Oligonucleotide
  source 1..25: mol_type = other DNA
acatgccacccaacaagagcagaat

SEQ ID NO: 30858 - DNA, 25 bp, synthetic construct
  misc_feature 1..25: note = Oligonucleotide
  source 1..25: mol_type = other DNA
agaacatgccacccaacaagagcag

SEQ ID NO: 30859 - DNA, 25 bp, synthetic construct
  misc_feature 1..25: note = Oligonucleotide
  source 1..25: mol_type = other DNA
tacagaacatgccacccaacaagag

SEQ ID NO: 30860 - DNA, 25 bp, synthetic construct
  misc_feature 1..25: note = Oligonucleotide
  source 1..25: mol_type = other DNA
acgtacagaacatgccacccaacaa

SEQ ID NO: 30861 - DNA, 25 bp, synthetic construct
  misc_feature 1..25: note = Oligonucleotide
  source 1..25: mol_type = other DNA
gatacgtacagaacatgccacccaa

SEQ ID NO: 30862 - DNA, 25 bp, synthetic construct
  misc_feature 1..25: note = Oligonucleotide
  source 1..25: mol_type = other DNA
aacgatacgtacagaacatgccacc

SEQ ID NO: 30863 - DNA, 25 bp, synthetic construct
  misc_feature 1..25: note = Oligonucleotide
  source 1..25: mol_type = other DNA
ctcaacgatacgtacagaacatgcc

SEQ ID NO: 30864 - DNA, 25 bp, synthetic construct
  misc_feature 1..25: note = Oligonucleotide
  source 1..25: mol_type = other DNA
agactcaacgatacgtacagaacat

SEQ ID NO: 30865 - DNA, 25 bp, synthetic construct
  misc_feature 1..25: note = Oligonucleotide
  source 1..25: mol_type = other DNA
attagactcaacgatacgtacagaa

SEQ ID NO: 30866 - DNA, 25 bp, synthetic construct
  misc_feature 1..25: note = Oligonucleotide
  source 1..25: mol_type = other DNA
ccaattagactcaacgatacgtaca

SEQ ID NO: 30867 - DNA, 25 bp, synthetic construct
  misc_feature 1..25: note = Oligonucleotide
  source 1..25: mol_type = other DNA
aaaccaattagactcaacgatacgt

SEQ ID NO: 30868 - DNA, 25 bp, synthetic construct
  misc_feature 1..25: note = Oligonucleotide
  source 1..25: mol_type = other DNA
cttaaaccaattagactcaacgata

SEQ ID NO: 30869 - DNA, 25 bp, synthetic construct
  misc_feature 1..25: note = Oligonucleotide
  source 1..25: mol_type = other DNA
agacttaaaccaattagactcaacg

SEQ ID NO: 30870 - DNA, 25 bp, synthetic construct
  misc_feature 1..25: note = Oligonucleotide
  source 1..25: mol_type = other DNA
agaagacttaaaccaattagactca

SEQ ID NO: 30871 - DNA, 25 bp, synthetic construct
  misc_feature 1..25: note = Oligonucleotide
  source 1..25: mol_type = other DNA
catagaagacttaaaccaattagac

SEQ ID NO: 30872 - DNA, 25 bp, synthetic construct
  misc_feature 1..25: note = Oligonucleotide
  source 1..25: mol_type = other DNA
ggacatagaagacttaaaccaatta

SEQ ID NO: 30873 - DNA, 25 bp, synthetic construct
  misc_feature 1..25: note = Oligonucleotide
  source 1..25: mol_type = other DNA
taaggacatagaagacttaaaccaa

SEQ ID NO: 30874 - DNA, 25 bp, synthetic construct
  misc_feature 1..25: note = Oligonucleotide
  source 1..25: mol_type = other DNA
caataaggacatagaagacttaaac

SEQ ID NO: 30875 - DNA, 25 bp, synthetic construct
  misc_feature 1..25: note = Oligonucleotide
  source 1..25: mol_type = other DNA
gatcaataaggacatagaagactta

SEQ ID NO: 30876 - DNA, 25 bp, synthetic construct
  misc_feature 1..25: note = Oligonucleotide
  source 1..25: mol_type = other DNA
agagatcaataaggacatagaagac

SEQ ID NO: 30877 - DNA, 25 bp, synthetic construct
  misc_feature 1..25: note = Oligonucleotide
  source 1..25: mol_type = other DNA
tggagagatcaataaggacatagaa

SEQ ID NO: 30878 - DNA, 25 bp, synthetic construct
  misc_feature 1..25: note = Oligonucleotide
  source 1..25: mol_type = other DNA
atctggagagatcaataaggacata

SEQ ID NO: 30879 - DNA, 25 bp, synthetic construct
  misc_feature 1..25: note = Oligonucleotide
  source 1..25: mol_type = other DNA
aacatctggagagatcaataaggac

SEQ ID NO: 30880 - DNA, 25 bp, synthetic construct
  misc_feature 1..25: note = Oligonucleotide
  source 1..25: mol_type = other DNA
tagaacatctggagagatcaataag

SEQ ID NO: 30881 - DNA, 25 bp, synthetic construct
  misc_feature 1..25: note = Oligonucleotide
  source 1..25: mol_type = other DNA
gggtagaacatctggagagatcaat

SEQ ID NO: 30882 - DNA, 25 bp, synthetic construct
  misc_feature 1..25: note = Oligonucleotide
  source 1..25: mol_type = other DNA
aatgggtagaacatctggagagatc

SEQ ID NO: 30883 - DNA, 25 bp, synthetic construct
  misc_feature 1..25: note = Oligonucleotide
  source 1..25: mol_type = other DNA
aataatgggtagaacatctggagag

SEQ ID NO: 30884 - DNA, 25 bp, synthetic construct
  misc_feature 1..25: note = Oligonucleotide
  source 1..25: mol_type = other DNA
ttcaataatgggtagaacatctgga

SEQ ID NO: 30885 - DNA, 25 bp, synthetic construct
  misc_feature 1..25: note = Oligonucleotide
  source 1..25: mol_type = other DNA
actttcaataatgggtagaacatct

SEQ ID NO: 30886 - DNA, 25 bp, synthetic construct
  misc_feature 1..25: note = Oligonucleotide
  source 1..25: mol_type = other DNA
cttactttcaataatgggtagaaca

SEQ ID NO: 30887 - DNA, 25 bp, synthetic construct
  misc_feature 1..25: note = Oligonucleotide
  source 1..25: mol_type = other DNA
taccttactttcaataatgggtaga

SEQ ID NO: 30888 - DNA, 25 bp, synthetic construct
  misc_feature 1..25: note = Oligonucleotide
  source 1..25: mol_type = other DNA
taataccttactttcaataatgggt

SEQ ID NO: 30889 - DNA, 25 bp, synthetic construct
  misc_feature 1..25: note = Oligonucleotide
  source 1..25: mol_type = other DNA
ctttaataccttactttcaataatg

SEQ ID NO: 30890 - DNA, 25 bp, synthetic construct
  misc_feature 1..25: note = Oligonucleotide
  source 1..25: mol_type = other DNA
aaactttaataccttactttcaata

SEQ ID NO: 30891 - DNA, 25 bp, synthetic construct
  misc_feature 1..25: note = Oligonucleotide
  source 1..25: mol_type = other DNA
aagaaactttaataccttactttca

SEQ ID NO: 30892 - DNA, 25 bp, synthetic construct
  misc_feature 1..25: note = Oligonucleotide
  source 1..25: mol_type = other DNA
agtaagaaactttaataccttactt

SEQ ID NO: 30893 - DNA, 25 bp, synthetic construct
  misc_feature 1..25: note = Oligonucleotide
  source 1..25: mol_type = other DNA
aatagtaagaaactttaatacctta

SEQ ID NO: 30894 - DNA, 25 bp, synthetic construct
  misc_feature 1..25: note = Oligonucleotide
  source 1..25: mol_type = other DNA
aataatagtaagaaactttaatacc

SEQ ID NO: 30895 - DNA, 25 bp, synthetic construct
  misc_feature 1..25: note = Oligonucleotide
  source 1..25: mol_type = other DNA
cacaataatagtaagaaactttaat

SEQ ID NO: 30896 - DNA, 25 bp, synthetic construct
  misc_feature 1..25: note = Oligonucleotide
  source 1..25: mol_type = other DNA
ttccacaataatagtaagaaacttt

SEQ ID NO: 30897 - DNA, 25 bp, synthetic construct
  misc_feature 1..25: note = Oligonucleotide
  source 1..25: mol_type = other DNA
cagttccacaataatagtaagaaac

SEQ ID NO: 30898 - DNA, 25 bp, synthetic construct
  misc_feature 1..25: note = Oligonucleotide
  source 1..25: mol_type = other DNA
agacagttccacaataatagtaaga

SEQ ID NO: 30899 - DNA, 25 bp, synthetic construct
  misc_feature 1..25: note = Oligonucleotide
  source 1..25: mol_type = other DNA
aatagacagttccacaataatagta

SEQ ID NO: 30900 - DNA, 25 bp, synthetic construct
  misc_feature 1..25: note = Oligonucleotide
  source 1..25: mol_type = other DNA
agaaatagacagttccacaataata

SEQ ID NO: 30901 - DNA, 25 bp, synthetic construct
  misc_feature 1..25: note = Oligonucleotide
  source 1..25: mol_type = other DNA
gagagaaatagacagttccacaata

SEQ ID NO: 30902 - DNA, 25 bp, synthetic construct
  misc_feature 1..25: note = Oligonucleotide
  source 1..25: mol_type = other DNA
taagagagaaatagacagttccaca

SEQ ID NO: 30903 - DNA, 25 bp, synthetic construct
  misc_feature 1..25: note = Oligonucleotide
  source 1..25: mol_type = other DNA
atttaagagagaaatagacagttcc

SEQ ID NO: 30904 - DNA, 25 bp, synthetic construct
  misc_feature 1..25: note = Oligonucleotide
  source 1..25: mol_type = other DNA
acaatttaagagagaaatagacagt

SEQ ID NO: 30905 - DNA, 25 bp, synthetic construct
  misc_feature 1..25: note = Oligonucleotide
  source 1..25: mol_type = other DNA
aacacaatttaagagagaaatagac

SEQ ID NO: 30906 - DNA, 25 bp, synthetic construct
  misc_feature 1..25: note = Oligonucleotide
  source 1..25: mol_type = other DNA
aacaacacaatttaagagagaaata

SEQ ID NO: 30907 - DNA, 25 bp, synthetic construct
  misc_feature 1..25: note = Oligonucleotide
  source 1..25: mol_type = other DNA
acaaacaacacaatttaagagagaa

SEQ ID NO: 30908 - DNA, 25 bp, synthetic construct
  misc_feature 1..25: note = Oligonucleotide
  source 1..25: mol_type = other DNA
gatacaaacaacacaatttaagaga

SEQ ID NO: 30909 - DNA, 25 bp, synthetic construct
  misc_feature 1..25: note = Oligonucleotide
  source 1..25: mol_type = other DNA
tatgatacaaacaacacaatttaag

SEQ ID NO: 30910 - DNA, 25 bp, synthetic construct
  misc_feature 1..25: note = Oligonucleotide
  source 1..25: mol_type = other DNA
aaatatgatacaaacaacacaattt

SEQ ID NO: 30911 - DNA, 25 bp, synthetic construct
  misc_feature 1..25: note = Oligonucleotide
  source 1..25: mol_type = other DNA
tcaaaatatgatacaaacaacacaa

SEQ ID NO: 30912 - DNA, 25 bp, synthetic construct
  misc_feature 1..25: note = Oligonucleotide
  source 1..25: mol_type = other DNA
acatcaaaatatgatacaaacaaca

SEQ ID NO: 30913 - DNA, 25 bp, synthetic construct
  misc_feature 1..25: note = Oligonucleotide
  source 1..25: mol_type = other DNA
agaacatcaaaatatgatacaaaca

SEQ ID NO: 30914 - DNA, 25 bp, synthetic construct
  misc_feature 1..25: note = Oligonucleotide
  source 1..25: mol_type = other DNA
aacagaacatcaaaatatgatacaa

SEQ ID NO: 30915 - DNA, 25 bp, synthetic construct
  misc_feature 1..25: note = Oligonucleotide
  source 1..25: mol_type = other DNA
aacaacagaacatcaaaatatgata

SEQ ID NO: 30916 - DNA, 25 bp, synthetic construct
  misc_feature 1..25: note = Oligonucleotide
  source 1..25: mol_type = other DNA
ccgaacaacagaacatcaaaatatg

SEQ ID NO: 30917 - DNA, 25 bp, synthetic construct
  misc_feature 1..25: note = Oligonucleotide
  source 1..25: mol_type = other DNA
acaccgaacaacagaacatcaaaat

SEQ ID NO: 30918 - DNA, 25 bp, synthetic construct
  misc_feature 1..25: note = Oligonucleotide
  source 1..25: mol_type = other DNA
tacacaccgaacaacagaacatcaa

SEQ ID NO: 30919 - DNA, 25 bp, synthetic construct
  misc_feature 1..25: note = Oligonucleotide
  source 1..25: mol_type = other DNA
atatacacaccgaacaacagaacat

SEQ ID NO: 30920 - DNA, 25 bp, synthetic construct
  misc_feature 1..25: note = Oligonucleotide
  source 1..25: mol_type = other DNA
aacatatacacaccgaacaacagaa

SEQ ID NO: 30921 - DNA, 25 bp, synthetic construct
  misc_feature 1..25: note = Oligonucleotide
  source 1..25: mol_type = other DNA
actaacatatacacaccgaacaaca

SEQ ID NO: 30922 - DNA, 25 bp, synthetic construct
  misc_feature 1..25: note = Oligonucleotide
  source 1..25: mol_type = other DNA
attactaacatatacacaccgaaca

SEQ ID NO: 30923 - DNA, 25 bp, synthetic construct
  misc_feature 1..25: note = Oligonucleotide
  source 1..25: mol_type = other DNA
acaattactaacatatacacaccga

SEQ ID NO: 30924 - DNA, 25 bp, synthetic construct
  misc_feature 1..25: note = Oligonucleotide
  source 1..25: mol_type = other DNA
ttaacaattactaacatatacacac

SEQ ID NO: 30925 - DNA, 25 bp, synthetic construct
  misc_feature 1..25: note = Oligonucleotide
  source 1..25: mol_type = other DNA
tgattaacaattactaacatataca

SEQ ID NO: 30926 - DNA, 25 bp, synthetic construct
  misc_feature 1..25: note = Oligonucleotide
  source 1..25: mol_type = other DNA
tgttgattaacaattactaacatat

SEQ ID NO: 30927 - DNA, 25 bp, synthetic construct
  misc_feature 1..25: note = Oligonucleotide
  source 1..25: mol_type = other DNA
atatgttgattaacaattactaaca

SEQ ID NO: 30928 - DNA, 25 bp, synthetic construct
  misc_feature 1..25: note = Oligonucleotide
  source 1..25: mol_type = other DNA
attatatgttgattaacaattacta

SEQ ID NO: 30929 - DNA, 25 bp, synthetic construct
  misc_feature 1..25: note = Oligonucleotide
  source 1..25: mol_type = other DNA
gacattatatgttgattaacaatta

SEQ ID NO: 30930 - DNA, 25 bp, synthetic construct
  misc_feature 1..25: note = Oligonucleotide
  source 1..25: mol_type = other DNA
aaggacattatatgttgattaacaa

SEQ ID NO: 30931 - DNA, 25 bp, synthetic construct
  misc_feature 1..25: note = Oligonucleotide
  source 1..25: mol_type = other DNA
gagaaggacattatatgttgattaa

SEQ ID NO: 30932 - DNA, 25 bp, synthetic construct
  misc_feature 1..25: note = Oligonucleotide
  source 1..25: mol_type = other DNA
acagagaaggacattatatgttgat

SEQ ID NO: 30933 - DNA, 25 bp, synthetic construct
  misc_feature 1..25: note = Oligonucleotide
  source 1..25: mol_type = other DNA
gagacagagaaggacattatatgtt

SEQ ID NO: 30934 - DNA, 25 bp, synthetic construct
  misc_feature 1..25: note = Oligonucleotide
  source 1..25: mol_type = other DNA
caagagacagagaaggacattatat

SEQ ID NO: 30935 - DNA, 25 bp, synthetic construct
  misc_feature 1..25: note = Oligonucleotide
  source 1..25: mol_type = other DNA
taacaagagacagagaaggacatta

SEQ ID NO: 30936 - DNA, 25 bp, synthetic construct
  misc_feature 1..25: note = Oligonucleotide
  source 1..25: mol_type = other DNA
ctgtaacaagagacagagaaggaca

SEQ ID NO: 30937 - DNA, 25 bp, synthetic construct
  misc_feature 1..25: note = Oligonucleotide
  source 1..25: mol_type = other DNA
aaactgtaacaagagacagagaagg

SEQ ID NO: 30938 - DNA, 25 bp, synthetic construct
  misc_feature 1..25: note = Oligonucleotide
  source 1..25: mol_type = other DNA
taaaaactgtaacaagagacagaga

SEQ ID NO: 30939 - DNA, 25 bp, synthetic construct
  misc_feature 1..25: note = Oligonucleotide
  source 1..25: mol_type = other DNA
agataaaaactgtaacaagagacag

SEQ ID NO: 30940 - DNA, 25 bp, synthetic construct
  misc_feature 1..25: note = Oligonucleotide
  source 1..25: mol_type = other DNA
ttaagataaaaactgtaacaagaga

SEQ ID NO: 30941 - DNA, 25 bp, synthetic construct
  misc_feature 1..25: note = Oligonucleotide
  source 1..25: mol_type = other DNA
actttaagataaaaactgtaacaag

SEQ ID NO: 30942 - DNA, 25 bp, synthetic construct
  misc_feature 1..25: note = Oligonucleotide
  source 1..25: mol_type = other DNA
taaactttaagataaaaactgtaac

SEQ ID NO: 30943 - DNA, 25 bp, synthetic construct
  misc_feature 1..25: note = Oligonucleotide
  source 1..25: mol_type = other DNA
aaataaactttaagataaaaactgt

SEQ ID NO: 30944 - DNA, 25 bp, synthetic construct
  misc_feature 1..25: note = Oligonucleotide
  source 1..25: mol_type = other DNA
acaaaataaactttaagataaaaac

SEQ ID NO: 30945 - DNA, 25 bp, synthetic construct
  misc_feature 1..25: note = Oligonucleotide
  source 1..25: mol_type = other DNA
catacaaaataaactttaagataaa

SEQ ID NO: 30946 - DNA, 25 bp, synthetic construct
  misc_feature 1..25: note = Oligonucleotide
  source 1..25: mol_type = other DNA
catcatacaaaataaactttaagat

SEQ ID NO: 30947 - DNA, 25 bp, synthetic construct
  misc_feature 1..25: note = Oligonucleotide
  source 1..25: mol_type = other DNA
taacatcatacaaaataaactttaa

SEQ ID NO: 30948 - DNA, 25 bp, synthetic construct
  misc_feature 1..25: note = Oligonucleotide
  source 1..25: mol_type = other DNA
tattaacatcatacaaaataaactt

SEQ ID NO: 30949 - DNA, 25 bp, synthetic construct
  misc_feature 1..25: note = Oligonucleotide
  source 1..25: mol_type = other DNA
ttatattaacatcatacaaaataaa

SEQ ID NO: 30950 - DNA, 25 bp, synthetic construct
  misc_feature 1..25: note = Oligonucleotide
  source 1..25: mol_type = other DNA
tggttatattaacatcatacaaaat

SEQ ID NO: 30951 - DNA, 25 bp, synthetic construct
  misc_feature 1..25: note = Oligonucleotide
  source 1..25: mol_type = other DNA
gggtggttatattaacatcatacaa

SEQ ID NO: 30952 - DNA, 25 bp, synthetic construct
  misc_feature 1..25: note = Oligonucleotide
  source 1..25: mol_type = other DNA
gctgggtggttatattaacatcata

SEQ ID NO: 30953 - DNA, 25 bp, synthetic construct
  misc_feature 1..25: note = Oligonucleotide
  source 1..25: mol_type = other DNA
agagctgggtggttatattaacatc

SEQ ID NO: 30954 - DNA, 25 bp, synthetic construct
  misc_feature 1..25: note = Oligonucleotide
  source 1..25: mol_type = other DNA
aagagagctgggtggttatattaac

SEQ ID NO: 30955 - DNA, 25 bp, synthetic construct
  misc_feature 1..25: note = Oligonucleotide
  source 1..25: mol_type = other DNA
caaaagagagctgggtggttatatt

SEQ ID NO: 30956 - DNA, 25 bp, synthetic construct
  misc_feature 1..25: note = Oligonucleotide
  source 1..25: mol_type = other DNA
aaccaaaagagagctgggtggttat

SEQ ID NO: 30957 - DNA, 25 bp, synthetic construct
  misc_feature 1..25: note = Oligonucleotide
  source 1..25: mol_type = other DNA
agtaaccaaaagagagctgggtggt

SEQ ID NO: 30958 - DNA, 25 bp, synthetic construct
  misc_feature 1..25: note = Oligonucleotide
  source 1..25: mol_type = other DNA
aatagtaaccaaaagagagctgggt

SEQ ID NO: 30959 - DNA, 25 bp, synthetic construct
  misc_feature 1..25: note = Oligonucleotide
  source 1..25: mol_type = other DNA
gtaaatagtaaccaaaagagagctg

SEQ ID NO: 30960 - DNA, 25 bp, synthetic construct
  misc_feature 1..25: note = Oligonucleotide
  source 1..25: mol_type = other DNA
aatgtaaatagtaaccaaaagagag

SEQ ID NO: 30961 - DNA, 25 bp, synthetic construct
  misc_feature 1..25: note = Oligonucleotide
  source 1..25: mol_type = other DNA
tctaatgtaaatagtaaccaaaaga

SEQ ID NO: 30962 - DNA, 25 bp, synthetic construct
  misc_feature 1..25: note = Oligonucleotide
  source 1..25: mol_type = other DNA
caatctaatgtaaatagtaaccaaa

SEQ ID NO: 30963 - DNA, 25 bp, synthetic construct
  misc_feature 1..25: note = Oligonucleotide
  source 1..25: mol_type = other DNA
aagcaatctaatgtaaatagtaacc

SEQ ID NO: 30964 - DNA, 25 bp, synthetic construct
  misc_feature 1..25: note = Oligonucleotide
  source 1..25: mol_type = other DNA
aaaaagcaatctaatgtaaatagta

SEQ ID NO: 30965 - DNA, 25 bp, synthetic construct
  misc_feature 1..25: note = Oligonucleotide
  source 1..25: mol_type = other DNA
taaaaaaagcaatctaatgtaaata

SEQ ID NO: 30966 - DNA, 25 bp, synthetic construct
  misc_feature 1..25: note = Oligonucleotide
  source 1..25: mol_type = other DNA
ggataaaaaaagcaatctaatgtaa

SEQ ID NO: 30967 - DNA, 25 bp, synthetic construct
  misc_feature 1..25: note = Oligonucleotide
  source 1..25: mol_type = other DNA
aaaggataaaaaaagcaatctaatg

SEQ ID NO: 30968 - DNA, 25 bp, synthetic construct
  misc_feature 1..25: note = Oligonucleotide
  source 1..25: mol_type = other DNA
gtgaaaggataaaaaaagcaatcta

SEQ ID NO: 30969 - DNA, 25 bp, synthetic construct
  misc_feature 1..25: note = Oligonucleotide
  source 1..25: mol_type = other DNA
aaagtgaaaggataaaaaaagcaat

SEQ ID NO: 30970 - DNA, 25 bp, synthetic construct
  misc_feature 1..25: note = Oligonucleotide
  source 1..25: mol_type = other DNA
ttcaaagtgaaaggataaaaaaagc

SEQ ID NO: 30971 - DNA, 25 bp, synthetic construct
  misc_feature 1..25: note = Oligonucleotide
  source 1..25: mol_type = other DNA
aggttcaaagtgaaaggataaaaaa

SEQ ID NO: 30972 - DNA, 25 bp, synthetic construct
  misc_feature 1..25: note = Oligonucleotide
  source 1..25: mol_type = other DNA
aataggttcaaagtgaaaggataaa

SEQ ID NO: 30973 - DNA, 25 bp, synthetic construct
  misc_feature 1..25: note = Oligonucleotide
  source 1..25: mol_type = other DNA
acaaataggttcaaagtgaaaggat

SEQ ID NO: 30974 - DNA, 25 bp, synthetic construct
  misc_feature 1..25: note = Oligonucleotide
  source 1..25: mol_type = other DNA
gacacaaataggttcaaagtgaaag

SEQ ID NO: 30975 - DNA, 25 bp, synthetic construct
  misc_feature 1..25: note = Oligonucleotide
  source 1..25: mol_type = other DNA
aaagacacaaataggttcaaagtga

SEQ ID NO: 30976 - DNA, 25 bp, synthetic construct
  misc_feature 1..25: note = Oligonucleotide
  source 1..25: mol_type = other DNA
tccaaagacacaaataggttcaaag

SEQ ID NO: 30977 - DNA, 25 bp, synthetic construct
  misc_feature 1..25: note = Oligonucleotide
  source 1..25: mol_type = other DNA
aaatccaaagacacaaataggttca

SEQ ID NO: 30978 - DNA, 25 bp, synthetic construct
  misc_feature 1..25: note = Oligonucleotide
  source 1..25: mol_type = other DNA
tttaaatccaaagacacaaataggt

SEQ ID NO: 30979 - DNA, 25 bp, synthetic construct
  misc_feature 1..25: note = Oligonucleotide
  source 1..25: mol_type = other DNA
cactttaaatccaaagacacaaata

SEQ ID NO: 30980 - DNA, 25 bp, synthetic construct
  misc_feature 1..25: note = Oligonucleotide
  source 1..25: mol_type = other DNA
aatcactttaaatccaaagacacaa

SEQ ID NO: 30981 - DNA, 25 bp, synthetic construct
  misc_feature 1..25: note = Oligonucleotide
  source 1..25: mol_type = other DNA
aataatcactttaaatccaaagaca

SEQ ID NO: 30982 - DNA, 25 bp, synthetic construct
  misc_feature 1..25: note = Oligonucleotide
  source 1..25: mol_type = other DNA
caaaataatcactttaaatccaaag

SEQ ID NO: 30983 - DNA, 25 bp, synthetic construct
  misc_feature 1..25: note = Oligonucleotide
  source 1..25: mol_type = other DNA
ttacaaaataatcactttaaatcca

SEQ ID NO: 30984 - DNA, 25 bp, synthetic construct
  misc_feature 1..25: note = Oligonucleotide
  source 1..25: mol_type = other DNA
tacttacaaaataatcactttaaat

SEQ ID NO: 30985 - DNA, 25 bp, synthetic construct
  misc_feature 1..25: note = Oligonucleotide
  source 1..25: mol_type = other DNA
tgctacttacaaaataatcacttta

SEQ ID NO: 30986 - DNA, 25 bp, synthetic construct
  misc_feature 1..25: note = Oligonucleotide
  source 1..25: mol_type = other DNA
atatgctacttacaaaataatcact

SEQ ID NO: 30987 - DNA, 25 bp, synthetic construct
  misc_feature 1..25: note = Oligonucleotide
  source 1..25: mol_type = other DNA
actatatgctacttacaaaataatc

SEQ ID NO: 30988 - DNA, 25 bp, synthetic construct
  misc_feature 1..25: note = Oligonucleotide
  source 1..25: mol_type = other DNA
ccaactatatgctacttacaaaata

SEQ ID NO: 30989 - DNA, 25 bp, synthetic construct
  misc_feature 1..25: note = Oligonucleotide
  source 1..25: mol_type = other DNA
tatccaactatatgctacttacaaa

SEQ ID NO: 30990 - DNA, 25 bp, synthetic construct
  misc_feature 1..25: note = Oligonucleotide
  source 1..25: mol_type = other DNA
tattatccaactatatgctacttac

SEQ ID NO: 30991 - DNA, 25 bp, synthetic construct
  misc_feature 1..25: note = Oligonucleotide
  source 1..25: mol_type = other DNA
aagtattatccaactatatgctact

SEQ ID NO: 30992 - DNA, 25 bp, synthetic construct
  misc_feature 1..25: note = Oligonucleotide
  source 1..25: mol_type = other DNA
aaaaagtattatccaactatatgct

SEQ ID NO: 30993 - DNA, 25 bp, synthetic construct
  misc_feature 1..25: note = Oligonucleotide
  source 1..25: mol_type = other DNA
attaaaaagtattatccaactatat

SEQ ID NO: 30994 - DNA, 25 bp, synthetic construct
  misc_feature 1..25: note = Oligonucleotide
  source 1..25: mol_type = other DNA
gtgattaaaaagtattatccaacta

SEQ ID NO: 30995 - DNA, 25 bp, synthetic construct
  misc_feature 1..25: note = Oligonucleotide
  source 1..25: mol_type = other DNA
atagtgattaaaaagtattatccaa

SEQ ID NO: 30996 - DNA, 25 bp, synthetic construct
  misc_feature 1..25: note = Oligonucleotide
  source 1..25: mol_type = other DNA
cagatagtgattaaaaagtattatc

SEQ ID NO: 30997 - DNA, 25 bp, synthetic construct
  misc_feature 1..25: note = Oligonucleotide
  source 1..25: mol_type = other DNA
aagcagatagtgattaaaaagtatt

SEQ ID NO: 30998 - DNA, 25 bp, synthetic construct
  misc_feature 1..25: note = Oligonucleotide
  source 1..25: mol_type = other DNA
aaaaagcagatagtgattaaaaagt

SEQ ID NO: 30999 - DNA, 25 bp, synthetic construct
  misc_feature 1..25: note = Oligonucleotide
  source 1..25: mol_type = other DNA
cttaaaaagcagatagtgattaaaa

SEQ ID NO: 31000 - DNA, 25 bp, synthetic construct
  misc_feature 1..25: note = Oligonucleotide
  source 1..25: mol_type = other DNA
ttacttaaaaagcagatagtgatta

SEQ ID NO: 31001 - DNA, 25 bp, synthetic construct
  misc_feature 1..25: note = Oligonucleotide
  source 1..25: mol_type = other DNA
attttacttaaaaagcagatagtga

SEQ ID NO: 31002 - DNA, 25 bp, synthetic construct
  misc_feature 1..25: note = Oligonucleotide
  source 1..25: mol_type = other DNA
agaattttacttaaaaagcagatag

SEQ ID NO: 31003 - DNA, 25 bp, synthetic construct
  misc_feature 1..25: note = Oligonucleotide
  source 1..25: mol_type = other DNA
aatagaattttacttaaaaagcaga

SEQ ID NO: 31004 - DNA, 25 bp, synthetic construct
  misc_feature 1..25: note = Oligonucleotide
  source 1..25: mol_type = other DNA
tccaatagaattttacttaaaaagc

SEQ ID NO: 31005 - DNA, 25 bp, synthetic construct
  misc_feature 1..25: note = Oligonucleotide
  source 1..25: mol_type = other DNA
tgttccaatagaattttacttaaaa

SEQ ID NO: 31006 - DNA, 25 bp, synthetic construct
  misc_feature 1..25: note = Oligonucleotide
  source 1..25: mol_type = other DNA
ttgtgttccaatagaattttactta

SEQ ID NO: 31007 - DNA, 25 bp, synthetic construct
  misc_feature 1..25: note = Oligonucleotide
  source 1..25: mol_type = other DNA
tgtttgtgttccaatagaattttac

SEQ ID NO: 31008 - DNA, 25 bp, synthetic construct
  misc_feature 1..25: note = Oligonucleotide
  source 1..25: mol_type = other DNA
gtgtgtttgtgttccaatagaattt

SEQ ID NO: 31009 - DNA, 25 bp, synthetic construct
  misc_feature 1..25: note = Oligonucleotide
  source 1..25: mol_type = other DNA
taggtgtgtttgtgttccaatagaa

SEQ ID NO: 31010 - DNA, 25 bp, synthetic construct
  misc_feature 1..25: note = Oligonucleotide
  source 1..25: mol_type = other DNA
agataggtgtgtttgtgttccaata

SEQ ID NO: 31011 - DNA, 25 bp, synthetic construct
  misc_feature 1..25: note = Oligonucleotide
  source 1..25: mol_type = other DNA
agcagataggtgtgtttgtgttcca

SEQ ID NO: 31012 - DNA, 25 bp, synthetic construct
  misc_feature 1..25: note = Oligonucleotide
  source 1..25: mol_type = other DNA
acaagcagataggtgtgtttgtgtt

SEQ ID NO: 31013 - DNA, 25 bp, synthetic construct
  misc_feature 1..25: note = Oligonucleotide
  source 1..25: mol_type = other DNA
catacaagcagataggtgtgtttgt

SEQ ID NO: 31014 - DNA, 25 bp, synthetic construct
  misc_feature 1..25: note = Oligonucleotide
  source 1..25: mol_type = other DNA
caacatacaagcagataggtgtgtt

SEQ ID NO: 31015 - DNA, 25 bp, synthetic construct
  misc_feature 1..25: note = Oligonucleotide
  source 1..25: mol_type = other DNA
aaacaacatacaagcagataggtgt

SEQ ID NO: 31016 - DNA, 25 bp, synthetic construct
  misc_feature 1..25: note = Oligonucleotide
  source 1..25: mol_type = other DNA
cacaaacaacatacaagcagatagg

SEQ ID NO: 31017 - DNA, 25 bp, synthetic construct
  misc_feature 1..25: note = Oligonucleotide
  source 1..25: mol_type = other DNA
caccacaaacaacatacaagcagat

SEQ ID NO: 31018 - DNA, 25 bp, synthetic construct
  misc_feature 1..25: note = Oligonucleotide
  source 1..25: mol_type = other DNA
aaccaccacaaacaacatacaagca

SEQ ID NO: 31019 - DNA, 25 bp, synthetic construct
  misc_feature 1..25: note = Oligonucleotide
  source 1..25: mol_type = other DNA
gaaaaccaccacaaacaacatacaa

SEQ ID NO: 31020 - DNA, 25 bp, synthetic construct
  misc_feature 1..25: note = Oligonucleotide
  source 1..25: mol_type = other DNA
catgaaaaccaccacaaacaacata

SEQ ID NO: 31021 - DNA, 25 bp, synthetic construct
  misc_feature 1..25: note = Oligonucleotide
  source 1..25: mol_type = other DNA
cagcatgaaaaccaccacaaacaac

SEQ ID NO: 31022 - DNA, 25 bp, synthetic construct
  misc_feature 1..25: note = Oligonucleotide
  source 1..25: mol_type = other DNA
ccgcagcatgaaaaccaccacaaac

SEQ ID NO: 31023 - DNA, 25 bp, synthetic construct
  misc_feature 1..25: note = Oligonucleotide
  source 1..25: mol_type = other DNA
ccaccgcagcatgaaaaccaccaca

SEQ ID NO: 31024 - DNA, 25 bp, synthetic construct
  misc_feature 1..25: note = Oligonucleotide
  source 1..25: mol_type = other DNA
ctgccaccgcagcatgaaaaccacc

SEQ ID NO: 31025 - DNA, 25 bp, synthetic construct
  misc_feature 1..25: note = Oligonucleotide
  source 1..25: mol_type = other DNA
actctgccaccgcagcatgaaaacc

SEQ ID NO: 31026 - DNA, 25 bp, synthetic construct
  misc_feature 1..25: note = Oligonucleotide
  source 1..25: mol_type = other DNA
tcaactctgccaccgcagcatgaaa

SEQ ID NO: 31027 - DNA, 25 bp, synthetic construct
  misc_feature 1..25: note = Oligonucleotide
  source 1..25: mol_type = other DNA
gactcaactctgccaccgcagcatg

SEQ ID NO: 31028 - DNA, 25 bp, synthetic construct
  misc_feature 1..25: note = Oligonucleotide
  source 1..25: mol_type = other DNA
aatgactcaactctgccaccgcagc

SEQ ID NO: 31029 - DNA, 25 bp, synthetic construct
  misc_feature 1..25: note = Oligonucleotide
  source 1..25: mol_type = other DNA
tgcaatgactcaactctgccaccgc

SEQ ID NO: 31030 - DNA, 25 bp, synthetic construct
  misc_feature 1..25: note = Oligonucleotide
  source 1..25: mol_type = other DNA
tgttgcaatgactcaactctgccac

SEQ ID NO: 31031 - DNA, 25 bp, synthetic construct
  misc_feature 1..25: note = Oligonucleotide
  source 1..25: mol_type = other DNA
ctgtgttgcaatgactcaactctgc

SEQ ID NO: 31032 - DNA, 25 bp, synthetic construct
  misc_feature 1..25: note = Oligonucleotide
  source 1..25: mol_type = other DNA
agtctgtgttgcaatgactcaactc

SEQ ID NO: 31033 - DNA, 25 bp, synthetic construct
  misc_feature 1..25: note = Oligonucleotide
  source 1..25: mol_type = other DNA
tatagtctgtgttgcaatgactcaa

SEQ ID NO: 31034 - DNA, 25 bp, synthetic construct
  misc_feature 1..25: note = Oligonucleotide
  source 1..25: mol_type = other DNA
ctatatagtctgtgttgcaatgact

SEQ ID NO: 31035 - DNA, 25 bp, synthetic construct
  misc_feature 1..25: note = Oligonucleotide
  source 1..25: mol_type = other DNA
aagctatatagtctgtgttgcaatg

SEQ ID NO: 31036 - DNA, 25 bp, synthetic construct
  misc_feature 1..25: note = Oligonucleotide
  source 1..25: mol_type = other DNA
tgcaagctatatagtctgtgttgca

SEQ ID NO: 31037 - DNA, 25 bp, synthetic construct
  misc_feature 1..25: note = Oligonucleotide
  source 1..25: mol_type = other DNA
ctttgcaagctatatagtctgtgtt

SEQ ID NO: 31038 - DNA, 25 bp, synthetic construct
  misc_feature 1..25: note = Oligonucleotide
  source 1..25: mol_type = other DNA
aggctttgcaagctatatagtctgt

SEQ ID NO: 31039 - DNA, 25 bp, synthetic construct
  misc_feature 1..25: note = Oligonucleotide
  source 1..25: mol_type = other DNA
ttaaggctttgcaagctatatagtc

SEQ ID NO: 31040 - DNA, 25 bp, synthetic construct
  misc_feature 1..25: note = Oligonucleotide
  source 1..25: mol_type = other DNA
tacttaaggctttgcaagctatata

SEQ ID NO: 31041 - DNA, 25 bp, synthetic construct
  misc_feature 1..25: note = Oligonucleotide
  source 1..25: mol_type = other DNA
aactacttaaggctttgcaagctat

SEQ ID NO: 31042 - DNA, 25 bp, synthetic construct
  misc_feature 1..25: note = Oligonucleotide
  source 1..25: mol_type = other DNA
agtaactacttaaggctttgcaagc

SEQ ID NO: 31043 - DNA, 25 bp, synthetic construct
  misc_feature 1..25: note = Oligonucleotide
  source 1..25: mol_type = other DNA
gacagtaactacttaaggctttgca

SEQ ID NO: 31044 - DNA, 25 bp, synthetic construct
  misc_feature 1..25: note = Oligonucleotide
  source 1..25: mol_type = other DNA
ttggacagtaactacttaaggcttt

SEQ ID NO: 31045 - DNA, 25 bp, synthetic construct
  misc_feature 1..25: note = Oligonucleotide
  source 1..25: mol_type = other DNA
gaattggacagtaactacttaaggc

SEQ ID NO: 31046 - DNA, 25 bp, synthetic construct
  misc_feature 1..25: note = Oligonucleotide
  source 1..25: mol_type = other DNA
aaagaattggacagtaactacttaa

SEQ ID NO: 31047 - DNA, 25 bp, synthetic construct
  misc_feature 1..25: note = Oligonucleotide
  source 1..25: mol_type = other DNA
tggaaagaattggacagtaactact

SEQ ID NO: 31048 - DNA, 25 bp, synthetic construct
  misc_feature 1..25: note = Oligonucleotide
  source 1..25: mol_type = other DNA
ttctggaaagaattggacagtaact

SEQ ID NO: 31049 - DNA, 25 bp, synthetic construct
  misc_feature 1..25: note = Oligonucleotide
  source 1..25: mol_type = other DNA
cttttctggaaagaattggacagta

SEQ ID NO: 31050 - DNA, 25 bp, synthetic construct
  misc_feature 1..25: note = Oligonucleotide
  source 1..25: mol_type = other DNA
aaccttttctggaaagaattggaca

SEQ ID NO: 31051 - DNA, 25 bp, synthetic construct
  misc_feature 1..25: note = Oligonucleotide
  source 1..25: mol_type = other DNA
gcaaaccttttctggaaagaattgg

SEQ ID NO: 31052 - DNA, 25 bp, synthetic construct
  misc_feature 1..25: note = Oligonucleotide
  source 1..25: mol_type = other DNA
tcagcaaaccttttctggaaagaat

SEQ ID NO: 31053 - DNA, 25 bp, synthetic construct
  misc_feature 1..25: note = Oligonucleotide
  source 1..25: mol_type = other DNA
ggatcagcaaaccttttctggaaag

SEQ ID NO: 31054 - DNA, 25 bp, synthetic construct
  misc_feature 1..25: note = Oligonucleotide
  source 1..25: mol_type = other DNA
cagggatcagcaaaccttttctgga

SEQ ID NO: 31055 - DNA, 25 bp, synthetic construct
  misc_feature 1..25: note = Oligonucleotide
  source 1..25: mol_type = other DNA
gaccagggatcagcaaaccttttct

SEQ ID NO: 31056 - DNA, 25 bp, synthetic construct
  misc_feature 1..25: note = Oligonucleotide
  source 1..25: mol_type = other DNA
ctagaccagggatcagcaaaccttt

SEQ ID NO: 31057 - DNA, 25 bp, synthetic construct
  misc_feature 1..25: note = Oligonucleotide
  source 1..25: mol_type = other DNA
attctagaccagggatcagcaaacc

SEQ ID NO: 31058 - DNA, 25 bp, synthetic construct
  misc_feature 1..25: note = Oligonucleotide
  source 1..25: mol_type = other DNA
gacattctagaccagggatcagcaa

SEQ ID NO: 31059 - DNA, 25 bp, synthetic construct
  misc_feature 1..25: note = Oligonucleotide
  source 1..25: mol_type = other DNA
aaagacattctagaccagggatcag

SEQ ID NO: 31060 - DNA, 25 bp, synthetic construct
  misc_feature 1..25: note = Oligonucleotide
  source 1..25: mol_type = other DNA
ataaaagacattctagaccagggat

SEQ ID NO: 31061 - DNA, 25 bp, synthetic construct
  misc_feature 1..25: note = Oligonucleotide
  source 1..25: mol_type = other DNA
actataaaagacattctagaccagg

SEQ ID NO: 31062 - DNA, 25 bp, synthetic construct
  misc_feature 1..25: note = Oligonucleotide
  source 1..25: mol_type = other DNA
gaaactataaaagacattctagacc

SEQ ID NO: 31063 - DNA, 25 bp, synthetic construct
  misc_feature 1..25: note = Oligonucleotide
  source 1..25: mol_type = other DNA
agggaaactataaaagacattctag

SEQ ID NO: 31064 - DNA, 25 bp, synthetic construct
  misc_feature 1..25: note = Oligonucleotide
  source 1..25: mol_type = other DNA
accagggaaactataaaagacattc

SEQ ID NO: 31065 - DNA, 25 bp, synthetic construct
  misc_feature 1..25: note = Oligonucleotide
  source 1..25: mol_type = other DNA
ataaccagggaaactataaaagaca

SEQ ID NO: 31066 - DNA, 25 bp, synthetic construct
  misc_feature 1..25: note = Oligonucleotide
  source 1..25: mol_type = other DNA
actataaccagggaaactataaaag

SEQ ID NO: 31067 - DNA, 25 bp, synthetic construct
  misc_feature 1..25: note = Oligonucleotide
  source 1..25: mol_type = other DNA
ttaactataaccagggaaactataa

SEQ ID NO: 31068 - DNA, 25 bp, synthetic construct
  misc_feature 1..25: note = Oligonucleotide
  source 1..25: mol_type = other DNA
cagttaactataaccagggaaacta

SEQ ID NO: 31069 - DNA, 25 bp, synthetic construct
  misc_feature 1..25: note = Oligonucleotide
  source 1..25: mol_type = other DNA
ttgcagttaactataaccagggaaa

SEQ ID NO: 31070 - DNA, 25 bp, synthetic construct
  misc_feature 1..25: note = Oligonucleotide
  source 1..25: mol_type = other DNA
catttgcagttaactataaccaggg

SEQ ID NO: 31071 - DNA, 25 bp, synthetic construct
  misc_feature 1..25: note = Oligonucleotide
  source 1..25: mol_type = other DNA
gaccatttgcagttaactataacca

SEQ ID NO: 31072 - DNA, 25 bp, synthetic construct
  misc_feature 1..25: note = Oligonucleotide
  source 1..25: mol_type = other DNA
caggaccatttgcagttaactataa

SEQ ID NO: 31073 - DNA, 25 bp, synthetic construct
  misc_feature 1..25: note = Oligonucleotide
  source 1..25: mol_type = other DNA
gaacaggaccatttgcagttaacta

SEQ ID NO: 31074 - DNA, 25 bp, synthetic construct
  misc_feature 1..25: note = Oligonucleotide
  source 1..25: mol_type = other DNA
gctgaacaggaccatttgcagttaa

SEQ ID NO: 31075 - DNA, 25 bp, synthetic construct
  misc_feature 1..25: note = Oligonucleotide
  source 1..25: mol_type = other DNA
actgctgaacaggaccatttgcagt

SEQ ID NO: 31076 - DNA, 25 bp, synthetic construct
  misc_feature 1..25: note = Oligonucleotide
  source 1..25: mol_type = other DNA
actactgctgaacaggaccatttgc

SEQ ID NO: 31077 - DNA, 25 bp, synthetic construct
  misc_feature 1..25: note = Oligonucleotide
  source 1..25: mol_type = other DNA
cagactactgctgaacaggaccatt

SEQ ID NO: 31078 - DNA, 25 bp, synthetic construct
  misc_feature 1..25: note = Oligonucleotide
  source 1..25: mol_type = other DNA
caccagactactgctgaacaggacc

SEQ ID NO: 31079 - DNA, 25 bp, synthetic construct
  misc_feature 1..25: note = Oligonucleotide
  source 1..25: mol_type = other DNA
tctcaccagactactgctgaacagg

SEQ ID NO: 31080 - DNA, 25 bp, synthetic construct
  misc_feature 1..25: note = Oligonucleotide
  source 1..25: mol_type = other DNA
gaatctcaccagactactgctgaac

SEQ ID NO: 31081 - DNA, 25 bp, synthetic construct
  misc_feature 1..25: note = Oligonucleotide
  source 1..25: mol_type = other DNA
gacgaatctcaccagactactgctg

SEQ ID NO: 31082 - DNA, 25 bp, synthetic construct
  misc_feature 1..25: note = Oligonucleotide
  source 1..25: mol_type = other DNA
tgtgacgaatctcaccagactactg

SEQ ID NO: 31083 - DNA, 25 bp, synthetic construct
  misc_feature 1..25: note = Oligonucleotide
  source 1..25: mol_type = other DNA
acatgtgacgaatctcaccagacta

SEQ ID NO: 31084 - DNA, 25 bp, synthetic construct
  misc_feature 1..25: note = Oligonucleotide
  source 1..25: mol_type = other DNA
gctacatgtgacgaatctcaccaga

SEQ ID NO: 31085 - DNA, 25 bp, synthetic construct
  misc_feature 1..25: note = Oligonucleotide
  source 1..25: mol_type = other DNA
caggctacatgtgacgaatctcacc

SEQ ID NO: 31086 - DNA, 25 bp, synthetic construct
  misc_feature 1..25: note = Oligonucleotide
  source 1..25: mol_type = other DNA
aaacaggctacatgtgacgaatctc

SEQ ID NO: 31087 - DNA, 25 bp, synthetic construct
  misc_feature 1..25: note = Oligonucleotide
  source 1..25: mol_type = other DNA
acaaaacaggctacatgtgacgaat

SEQ ID NO: 31088 - DNA, 25 bp, synthetic construct
  misc_feature 1..25: note = Oligonucleotide
  source 1..25: mol_type = other DNA
gagacaaaacaggctacatgtgacg

SEQ ID NO: 31089 - DNA, 25 bp, synthetic construct
  misc_feature 1..25: note = Oligonucleotide
  source 1..25: mol_type = other DNA
ggagagacaaaacaggctacatgtg

SEQ ID NO: 31090 - DNA, 25 bp, synthetic construct
  misc_feature 1..25: note = Oligonucleotide
  source 1..25: mol_type = other DNA
tcaggagagacaaaacaggctacat

SEQ ID NO: 31091 - DNA, 25 bp, synthetic construct
  misc_feature 1..25: note = Oligonucleotide
  source 1..25: mol_type = other DNA
gcttcaggagagacaaaacaggcta

SEQ ID NO: 31092 - DNA, 25 bp, synthetic construct
  misc_feature 1..25: note = Oligonucleotide
  source 1..25: mol_type = other DNA
caagcttcaggagagacaaaacagg

SEQ ID NO: 31093 - DNA, 25 bp, synthetic construct
  misc_feature 1..25: note = Oligonucleotide
  source 1..25: mol_type = other DNA
tcacaagcttcaggagagacaaaac

SEQ ID NO: 31094 - DNA, 25 bp, synthetic construct
  misc_feature 1..25: note = Oligonucleotide
  source 1..25: mol_type = other DNA
atttcacaagcttcaggagagacaa

SEQ ID NO: 31095 - DNA, 25 bp, synthetic construct
  misc_feature 1..25: note = Oligonucleotide
  source 1..25: mol_type = other DNA
tgcatttcacaagcttcaggagaga

SEQ ID NO: 31096 - DNA, 25 bp, synthetic construct
  misc_feature 1..25: note = Oligonucleotide
  source 1..25: mol_type = other DNA
aactgcatttcacaagcttcaggag

SEQ ID NO: 31097 - DNA, 25 bp, synthetic construct
  misc_feature 1..25: note = Oligonucleotide
  source 1..25: mol_type = other DNA
aagaactgcatttcacaagcttcag

SEQ ID NO: 31098 - DNA, 25 bp, synthetic construct
  misc_feature 1..25: note = Oligonucleotide
  source 1..25: mol_type = other DNA
tctaagaactgcatttcacaagctt

SEQ ID NO: 31099 - DNA, 25 bp, synthetic construct
  misc_feature 1..25: note = Oligonucleotide
  source 1..25: mol_type = other DNA
tgctctaagaactgcatttcacaag

SEQ ID NO: 31100 - DNA, 25 bp, synthetic construct
  misc_feature 1..25: note = Oligonucleotide
  source 1..25: mol_type = other DNA
atatgctctaagaactgcatttcac

SEQ ID NO: 31101 - DNA, 25 bp, synthetic construct
  misc_feature 1..25: note = Oligonucleotide
  source 1..25: mol_type = other DNA
cagatatgctctaagaactgcattt

SEQ ID NO: 31102 - DNA, 25 bp, synthetic construct
  misc_feature 1..25: note = Oligonucleotide
  source 1..25: mol_type = other DNA
gctcagatatgctctaagaactgca

SEQ ID NO: 31103 - DNA, 25 bp, synthetic construct
  misc_feature 1..25: note = Oligonucleotide
  source 1..25: mol_type = other DNA
ggtgctcagatatgctctaagaact

SEQ ID NO: 31104 - DNA, 25 bp, synthetic construct
  misc_feature 1..25: note = Oligonucleotide
  source 1..25: mol_type = other DNA
gagggtgctcagatatgctctaaga

SEQ ID NO: 31105 - DNA, 25 bp, synthetic construct
  misc_feature 1..25: note = Oligonucleotide
  source 1..25: mol_type = other DNA
cttgagggtgctcagatatgctcta

SEQ ID NO: 31106 - DNA, 25 bp, synthetic construct
  misc_feature 1..25: note = Oligonucleotide
  source 1..25: mol_type = other DNA
ggccttgagggtgctcagatatgct

SEQ ID NO: 31107 - DNA, 25 bp, synthetic construct
  misc_feature 1..25: note = Oligonucleotide
  source 1..25: mol_type = other DNA
aggggccttgagggtgctcagatat

SEQ ID NO: 31108 - DNA, 25 bp, synthetic construct
  misc_feature 1..25: note = Oligonucleotide
  source 1..25: mol_type = other DNA
gaaaggggccttgagggtgctcaga

SEQ ID NO: 31109 - DNA, 25 bp, synthetic construct
  misc_feature 1..25: note = Oligonucleotide
  source 1..25: mol_type = other DNA
gccgaaaggggccttgagggtgctc

SEQ ID NO: 31110 - DNA, 25 bp, synthetic construct
  misc_feature 1..25: note = Oligonucleotide
  source 1..25: mol_type = other DNA
tcagccgaaaggggccttgagggtg

SEQ ID NO: 31111 - DNA, 25 bp, synthetic construct
  misc_feature 1..25: note = Oligonucleotide
  source 1..25: mol_type = other DNA
ctctcagccgaaaggggccttgagg

SEQ ID NO: 31112 - DNA, 25 bp, synthetic construct
  misc_feature 1..25: note = Oligonucleotide
  source 1..25: mol_type = other DNA
ctcctctcagccgaaaggggccttg

SEQ ID NO: 31113 - DNA, 25 bp, synthetic construct
  misc_feature 1..25: note = Oligonucleotide
  source 1..25: mol_type = other DNA
cttctcctctcagccgaaaggggcc

SEQ ID NO: 31114 - DNA, 25 bp, synthetic construct
  misc_feature 1..25: note = Oligonucleotide
  source 1..25: mol_type = other DNA
ctgcttctcctctcagccgaaaggg

SEQ ID NO: 31115 - DNA, 25 bp, synthetic construct
  misc_feature 1..25: note = Oligonucleotide
  source 1..25: mol_type = other DNA
agcctgcttctcctctcagccgaaa

SEQ ID NO: 31116 - DNA, 25 bp, synthetic construct
  misc_feature 1..25: note = Oligonucleotide
  source 1..25: mol_type = other DNA
agaagcctgcttctcctctcagccg

SEQ ID NO: 31117 - DNA, 25 bp, synthetic construct
  misc_feature 1..25: note = Oligonucleotide
  source 1..25: mol_type = other DNA
ggtagaagcctgcttctcctctcag

SEQ ID NO: 31118 - DNA, 25 bp, synthetic construct
  misc_feature 1..25: note = Oligonucleotide
  source 1..25: mol_type = other DNA
agaggtagaagcctgcttctcctct

SEQ ID NO: 31119 - DNA, 25 bp, synthetic construct
  misc_feature 1..25: note = Oligonucleotide
  source 1..25: mol_type = other DNA
ttcagaggtagaagcctgcttctcc

SEQ ID NO: 31120 - DNA, 25 bp, synthetic construct
  misc_feature 1..25: note = Oligonucleotide
  source 1..25: mol_type = other DNA
agcttcagaggtagaagcctgcttc

SEQ ID NO: 31121 - DNA, 25 bp, synthetic construct
  misc_feature 1..25: note = Oligonucleotide
  source 1..25: mol_type = other DNA
cctagcttcagaggtagaagcctgc

SEQ ID NO: 31122 - DNA, 25 bp, synthetic construct
  misc_feature 1..25: note = Oligonucleotide
  source 1..25: mol_type = other DNA
caccctagcttcagaggtagaagcc

SEQ ID NO: 31123 - DNA, 25 bp, synthetic construct
  misc_feature 1..25: note = Oligonucleotide
  source 1..25: mol_type = other DNA
tctcaccctagcttcagaggtagaa

SEQ ID NO: 31124 - DNA, 25 bp, synthetic construct
  misc_feature 1..25: note = Oligonucleotide
  source 1..25: mol_type = other DNA
gcctctcaccctagcttcagaggta

SEQ ID NO: 31125 - DNA, 25 bp, synthetic construct
  misc_feature 1..25: note = Oligonucleotide
  source 1..25: mol_type = other DNA
actgcctctcaccctagcttcagag

SEQ ID NO: 31126 - DNA, 25 bp, synthetic construct
  misc_feature 1..25: note = Oligonucleotide
  source 1..25: mol_type = other DNA
caaactgcctctcaccctagcttca

SEQ ID NO: 31127 - DNA, 25 bp, synthetic construct
  misc_feature 1..25: note = Oligonucleotide
  source 1..25: mol_type = other DNA
agtcaaactgcctctcaccctagct

SEQ ID NO: 31128 - DNA, 25 bp, synthetic construct
  misc_feature 1..25: note = Oligonucleotide
  source 1..25: mol_type = other DNA
cccagtcaaactgcctctcacccta

SEQ ID NO: 31129 - DNA, 25 bp, synthetic construct
  misc_feature 1..25: note = Oligonucleotide
  source 1..25: mol_type = other DNA
catcccagtcaaactgcctctcacc

SEQ ID NO: 31130 - DNA, 25 bp, synthetic construct
  misc_feature 1..25: note = Oligonucleotide
  source 1..25: mol_type = other DNA
ccacatcccagtcaaactgcctctc

SEQ ID NO: 31131 - DNA, 25 bp, synthetic construct
  misc_feature 1..25: note = Oligonucleotide
  source 1..25: mol_type = other DNA
gggccacatcccagtcaaactgcct

SEQ ID NO: 31132 - DNA, 25 bp, synthetic construct
  misc_feature 1..25: note = Oligonucleotide
  source 1..25: mol_type = other DNA
aaggggccacatcccagtcaaactg

SEQ ID NO: 31133 - DNA, 25 bp, synthetic construct
  misc_feature 1..25: note = Oligonucleotide
  source 1..25: mol_type = other DNA
attaaggggccacatcccagtcaaa

SEQ ID NO: 31134 - DNA, 25 bp, synthetic construct
  misc_feature 1..25: note = Oligonucleotide
  source 1..25: mol_type = other DNA
accattaaggggccacatcccagtc

SEQ ID NO: 31135 - DNA, 25 bp, synthetic construct
  misc_feature 1..25: note = Oligonucleotide
  source 1..25: mol_type = other DNA
gctaccattaaggggccacatccca

SEQ ID NO: 31136 - DNA, 25 bp, synthetic construct
  misc_feature 1..25: note = Oligonucleotide
  source 1..25: mol_type = other DNA
gaagctaccattaaggggccacatc

SEQ ID NO: 31137 - DNA, 25 bp, synthetic construct
  misc_feature 1..25: note = Oligonucleotide
  source 1..25: mol_type = other DNA
aatgaagctaccattaaggggccac

SEQ ID NO: 31138 - DNA, 25 bp, synthetic construct
  misc_feature 1..25: note = Oligonucleotide
  source 1..25: mol_type = other DNA
acaaatgaagctaccattaaggggc

SEQ ID NO: 31139 - DNA, 25 bp, synthetic construct
  misc_feature 1..25: note = Oligonucleotide
  source 1..25: mol_type = other DNA
cctacaaatgaagctaccattaagg

SEQ ID NO: 31140 - DNA, 25 bp, synthetic construct
  misc_feature 1..25: note = Oligonucleotide
  source 1..25: mol_type = other DNA
caccctacaaatgaagctaccatta

SEQ ID NO: 31141 - DNA, 25 bp, synthetic construct
  misc_feature 1..25: note = Oligonucleotide
  source 1..25: mol_type = other DNA
ggccaccctacaaatgaagctacca

SEQ ID NO: 31142 - DNA, 25 bp, synthetic construct
  misc_feature 1..25: note = Oligonucleotide
  source 1..25: mol_type = other DNA
gttggccaccctacaaatgaagcta

SEQ ID NO: 31143 - DNA, 25 bp, synthetic construct
  misc_feature 1..25: note = Oligonucleotide
  source 1..25: mol_type = other DNA
agagttggccaccctacaaatgaag

SEQ ID NO: 31144 - DNA, 25 bp, synthetic construct
  misc_feature 1..25: note = Oligonucleotide
  source 1..25: mol_type = other DNA
aaaagagttggccaccctacaaatg

SEQ ID NO: 31145 - DNA, 25 bp, synthetic construct
  misc_feature 1..25: note = Oligonucleotide
  source 1..25: mol_type = other DNA
accaaaagagttggccaccctacaa

SEQ ID NO: 31146 - DNA, 25 bp, synthetic construct
  misc_feature 1..25: note = Oligonucleotide
  source 1..25: mol_type = other DNA
caaaccaaaagagttggccacccta

SEQ ID NO: 31147 - DNA, 25 bp, synthetic construct
  misc_feature 1..25: note = Oligonucleotide
  source 1..25: mol_type = other DNA
aggcaaaccaaaagagttggccacc

SEQ ID NO: 31148 - DNA, 25 bp, synthetic construct
  misc_feature 1..25: note = Oligonucleotide
  source 1..25: mol_type = other DNA
tccaggcaaaccaaaagagttggcc

SEQ ID NO: 31149 - DNA, 25 bp, synthetic construct
  misc_feature 1..25: note = Oligonucleotide
  source 1..25: mol_type = other DNA
ggttccaggcaaaccaaaagagttg

SEQ ID NO: 31150 - DNA, 25 bp, synthetic construct
  misc_feature 1..25: note = Oligonucleotide
  source 1..25: mol_type = other DNA
cttggttccaggcaaaccaaaagag

SEQ ID NO: 31151 - DNA, 25 bp, synthetic construct
  misc_feature 1..25: note = Oligonucleotide
  source 1..25: mol_type = other DNA
tgccttggttccaggcaaaccaaaa

SEQ ID NO: 31152 - DNA, 25 bp, synthetic construct
  misc_feature 1..25: note = Oligonucleotide
  source 1..25: mol_type = other DNA
aactgccttggttccaggcaaacca

SEQ ID NO: 31153 - DNA, 25 bp, synthetic construct
  misc_feature 1..25: note = Oligonucleotide
  source 1..25: mol_type = other DNA
aggaactgccttggttccaggcaaa

SEQ ID NO: 31154 - DNA, 25 bp, synthetic construct
  misc_feature 1..25: note = Oligonucleotide
  source 1..25: mol_type = other DNA
tccaggaactgccttggttccaggc

SEQ ID NO: 31155 - DNA, 25 bp, synthetic construct
  misc_feature 1..25: note = Oligonucleotide
  source 1..25: mol_type = other DNA
tgttccaggaactgccttggttcca

SEQ ID NO: 31156 - DNA, 25 bp, synthetic construct
  misc_feature 1..25: note = Oligonucleotide
  source 1..25: mol_type = other DNA
ctatgttccaggaactgccttggtt

SEQ ID NO: 31157 - DNA, 25 bp, synthetic construct
  misc_feature 1..25: note = Oligonucleotide
  source 1..25: mol_type = other DNA
atcctatgttccaggaactgccttg

SEQ ID NO: 31158 - DNA, 25 bp, synthetic construct
  misc_feature 1..25: note = Oligonucleotide
  source 1..25: mol_type = other DNA
taaatcctatgttccaggaactgcc

SEQ ID NO: 31159 - DNA, 25 bp, synthetic construct
  misc_feature 1..25: note = Oligonucleotide
  source 1..25: mol_type = other DNA
aactaaatcctatgttccaggaact

SEQ ID NO: 31160 - DNA, 25 bp, synthetic construct
  misc_feature 1..25: note = Oligonucleotide
  source 1..25: mol_type = other DNA
taaaactaaatcctatgttccagga

SEQ ID NO: 31161 - DNA, 25 bp, synthetic construct
  misc_feature 1..25: note = Oligonucleotide
  source 1..25: mol_type = other DNA
tgttaaaactaaatcctatgttcca

SEQ ID NO: 31162 - DNA, 25 bp, synthetic construct
  misc_feature 1..25: note = Oligonucleotide
  source 1..25: mol_type = other DNA
agatgttaaaactaaatcctatgtt

SEQ ID NO: 31163 - DNA, 25 bp, synthetic construct
  misc_feature 1..25: note = Oligonucleotide
  source 1..25: mol_type = other DNA
tccagatgttaaaactaaatcctat

SEQ ID NO: 31164 - DNA, 25 bp, synthetic construct
  misc_feature 1..25: note = Oligonucleotide
  source 1..25: mol_type = other DNA
ctttccagatgttaaaactaaatcc

SEQ ID NO: 31165 - DNA, 25 bp, synthetic construct
  misc_feature 1..25: note = Oligonucleotide
  source 1..25: mol_type = other DNA
aggctttccagatgttaaaactaaa

SEQ ID NO: 31166 - DNA, 25 bp, synthetic construct
  misc_feature 1..25: note = Oligonucleotide
  source 1..25: mol_type = other DNA
cccaggctttccagatgttaaaact

SEQ ID NO: 31167 - DNA, 25 bp, synthetic construct
  misc_feature 1..25: note = Oligonucleotide
  source 1..25: mol_type = other DNA
ttgcccaggctttccagatgttaaa

SEQ ID NO: 31168 - DNA, 25 bp, synthetic construct
  misc_feature 1..25: note = Oligonucleotide
  source 1..25: mol_type = other DNA
agtttgcccaggctttccagatgtt

SEQ ID NO: 31169 - DNA, 25 bp, synthetic construct
  misc_feature 1..25: note = Oligonucleotide
  source 1..25: mol_type = other DNA
tccagtttgcccaggctttccagat

SEQ ID NO: 31170 - DNA, 25 bp, synthetic construct
  misc_feature 1..25: note = Oligonucleotide
  source 1..25: mol_type = other DNA
ttgtccagtttgcccaggctttcca

SEQ ID NO: 31171 - DNA, 25 bp, synthetic construct
  misc_feature 1..25: note = Oligonucleotide
  source 1..25: mol_type = other DNA
aacttgtccagtttgcccaggcttt

SEQ ID NO: 31172 - DNA, 25 bp, synthetic construct
  misc_feature 1..25: note = Oligonucleotide
  source 1..25: mol_type = other DNA
accaacttgtccagtttgcccaggc

SEQ ID NO: 31173 - DNA, 25 bp, synthetic construct
  misc_feature 1..25: note = Oligonucleotide
  source 1..25: mol_type = other DNA
gtgaccaacttgtccagtttgccca

SEQ ID NO: 31174 - DNA, 25 bp, synthetic construct
  misc_feature 1..25: note = Oligonucleotide
  source 1..25: mol_type = other DNA
tgggtgaccaacttgtccagtttgc

SEQ ID NO: 31175 - DNA, 25 bp, synthetic construct
  misc_feature 1..25: note = Oligonucleotide
  source 1..25: mol_type = other DNA
agctgggtgaccaacttgtccagtt

SEQ ID NO: 31176 - DNA, 25 bp, synthetic construct
  misc_feature 1..25: note = Oligonucleotide
  source 1..25: mol_type = other DNA
gccagctgggtgaccaacttgtcca

SEQ ID NO: 31177 - DNA, 25 bp, synthetic construct
  misc_feature 1..25: note = Oligonucleotide
  source 1..25: mol_type = other DNA
acagccagctgggtgaccaacttgt

SEQ ID NO: 31178 - DNA, 25 bp, synthetic construct
  misc_feature 1..25: note = Oligonucleotide
  source 1..25: mol_type = other DNA
tgaacagccagctgggtgaccaact

SEQ ID NO: 31179 - DNA, 25 bp, synthetic construct
  misc_feature 1..25: note = Oligonucleotide
  source 1..25: mol_type = other DNA
ctctgaacagccagctgggtgacca

SEQ ID NO: 31180 - DNA, 25 bp, synthetic construct
  misc_feature 1..25: note = Oligonucleotide
  source 1..25: mol_type = other DNA
agactctgaacagccagctgggtga

SEQ ID NO: 31181 - DNA, 25 bp, synthetic construct
  misc_feature 1..25: note = Oligonucleotide
  source 1..25: mol_type = other DNA
gtaagactctgaacagccagctggg

SEQ ID NO: 31182 - DNA, 25 bp, synthetic construct
  misc_feature 1..25: note = Oligonucleotide
  source 1..25: mol_type = other DNA
taggtaagactctgaacagccagct

SEQ ID NO: 31183 - DNA, 25 bp, synthetic construct
  misc_feature 1..25: note = Oligonucleotide
  source 1..25: mol_type = other DNA
gcataggtaagactctgaacagcca

SEQ ID NO: 31184 - DNA, 25 bp, synthetic construct
  misc_feature 1..25: note = Oligonucleotide
  source 1..25: mol_type = other DNA
ggggcataggtaagactctgaacag

SEQ ID NO: 31185 - DNA, 25 bp, synthetic construct
  misc_feature 1..25: note = Oligonucleotide
  source 1..25: mol_type = other DNA
aagggggcataggtaagactctgaa

SEQ ID NO: 31186 - DNA, 25 bp, synthetic construct
  misc_feature 1..25: note = Oligonucleotide
  source 1..25: mol_type = other DNA
ggtaagggggcataggtaagactct

SEQ ID NO: 31187 - DNA, 25 bp, synthetic construct
  misc_feature 1..25: note = Oligonucleotide
  source 1..25: mol_type = other DNA
tggggtaagggggcataggtaagac

SEQ ID NO: 31188 - DNA, 25 bp, synthetic construct
  misc_feature 1..25: note = Oligonucleotide
  source 1..25: mol_type = other DNA
tactggggtaagggggcataggtaa

SEQ ID NO: 31189 - DNA, 25 bp, synthetic construct
  misc_feature 1..25: note = Oligonucleotide
  source 1..25: mol_type = other DNA
tggtactggggtaagggggcatagg

SEQ ID NO: 31190 - DNA, 25 bp, synthetic construct
  misc_feature 1..25: note = Oligonucleotide
  source 1..25: mol_type = other DNA
gaatggtactggggtaagggggcat

SEQ ID NO: 31191 - DNA, 25 bp, synthetic construct
  misc_feature 1..25: note = Oligonucleotide
  source 1..25: mol_type = other DNA
cctgaatggtactggggtaaggggg

SEQ ID NO: 31192 - DNA, 25 bp, synthetic construct
  misc_feature 1..25: note = Oligonucleotide
  source 1..25: mol_type = other DNA
ttccctgaatggtactggggtaagg

SEQ ID NO: 31193 - DNA, 25 bp, synthetic construct
  misc_feature 1..25: note = Oligonucleotide
  source 1..25: mol_type = other DNA
ggtttccctgaatggtactggggta

SEQ ID NO: 31194 - DNA, 25 bp, synthetic construct
  misc_feature 1..25: note = Oligonucleotide
  source 1..25: mol_type = other DNA
gggggtttccctgaatggtactggg

SEQ ID NO: 31195 - DNA, 25 bp, synthetic construct
  misc_feature 1..25: note = Oligonucleotide
  source 1..25: mol_type = other DNA
gctgggggtttccctgaatggtact

SEQ ID NO: 31196 - DNA, 25 bp, synthetic construct
  misc_feature 1..25: note = Oligonucleotide
  source 1..25: mol_type = other DNA
atagctgggggtttccctgaatggt

SEQ ID NO: 31197 - DNA, 25 bp, synthetic construct
  misc_feature 1..25: note = Oligonucleotide
  source 1..25: mol_type = other DNA
cgcatagctgggggtttccctgaat

SEQ ID NO: 31198 - DNA, 25 bp, synthetic construct
  misc_feature 1..25: note = Oligonucleotide
  source 1..25: mol_type = other DNA
cttcgcatagctgggggtttccctg

SEQ ID NO: 31199 - DNA, 25 bp, synthetic construct
  misc_feature 1..25: note = Oligonucleotide
  source 1..25: mol_type = other DNA
ccgcttcgcatagctgggggtttcc

SEQ ID NO: 31200 - DNA, 25 bp, synthetic construct
  misc_feature 1..25: note = Oligonucleotide
  source 1..25: mol_type = other DNA
ccgccgcttcgcatagctgggggtt

SEQ ID NO: 31201 - DNA, 25 bp, synthetic construct
  misc_feature 1..25: note = Oligonucleotide
  source 1..25: mol_type = other DNA
tcgccgccgcttcgcatagctgggg

SEQ ID NO: 31202 - DNA, 25 bp, synthetic construct
  misc_feature 1..25: note = Oligonucleotide
  source 1..25: mol_type = other DNA
cagtcgccgccgcttcgcatagctg

SEQ ID NO: 31203 - DNA, 25 bp, synthetic construct
  misc_feature 1..25: note = Oligonucleotide
  source 1..25: mol_type = other DNA
agccagtcgccgccgcttcgcatag

SEQ ID NO: 31204 - DNA, 25 bp, synthetic construct
  misc_feature 1..25: note = Oligonucleotide
  source 1..25: mol_type = other DNA
gccagccagtcgccgccgcttcgca

SEQ ID NO: 31205 - DNA, 25 bp, synthetic construct
  misc_feature 1..25: note = Oligonucleotide
  source 1..25: mol_type = other DNA
ggggccagccagtcgccgccgcttc

SEQ ID NO: 31206 - DNA, 25 bp, synthetic construct
  misc_feature 1..25: note = Oligonucleotide
  source 1..25: mol_type = other DNA
actggggccagccagtcgccgccgc

SEQ ID NO: 31207 - DNA, 25 bp, synthetic construct
  misc_feature 1..25: note = Oligonucleotide
  source 1..25: mol_type = other DNA
gccactggggccagccagtcgccgc

SEQ ID NO: 31208 - DNA, 25 bp, synthetic construct
  misc_feature 1..25: note = Oligonucleotide
  source 1..25: mol_type = other DNA
caagccactggggccagccagtcgc

SEQ ID NO: 31209 - DNA, 25 bp, synthetic construct
  misc_feature 1..25: note = Oligonucleotide
  source 1..25: mol_type = other DNA
tgccaagccactggggccagccagt

SEQ ID NO: 31210 - DNA, 25 bp, synthetic construct
  misc_feature 1..25: note = Oligonucleotide
  source 1..25: mol_type = other DNA
ggatgccaagccactggggccagcc

SEQ ID NO: 31211 - DNA, 25 bp, synthetic construct
  misc_feature 1..25: note = Oligonucleotide
  source 1..25: mol_type = other DNA
aggggatgccaagccactggggcca

SEQ ID NO: 31212 - DNA, 25 bp, synthetic construct
  misc_feature 1..25: note = Oligonucleotide
  source 1..25: mol_type = other DNA
ccgaggggatgccaagccactgggg

SEQ ID NO: 31213 - DNA, 25 bp, synthetic construct
  misc_feature 1..25: note = Oligonucleotide
  source 1..25: mol_type = other DNA
aggccgaggggatgccaagccactg

SEQ ID NO: 31214 - DNA, 25 bp, synthetic construct
  misc_feature 1..25: note = Oligonucleotide
  source 1..25: mol_type = other DNA
cagaggccgaggggatgccaagcca

SEQ ID NO: 31215 - DNA, 25 bp, synthetic construct
  misc_feature 1..25: note = Oligonucleotide
  source 1..25: mol_type = other DNA
ctgcagaggccgaggggatgccaag

SEQ ID NO: 31216 - DNA, 25 bp, synthetic construct
  misc_feature 1..25: note = Oligonucleotide
  source 1..25: mol_type = other DNA
gcgctgcagaggccgaggggatgcc

SEQ ID NO: 31217 - DNA, 25 bp, synthetic construct
  misc_feature 1..25: note = Oligonucleotide
  source 1..25: mol_type = other DNA
tgagcgctgcagaggccgaggggat

SEQ ID NO: 31218 - DNA, 25 bp, synthetic construct
  misc_feature 1..25: note = Oligonucleotide
  source 1..25: mol_type = other DNA
ggctgagcgctgcagaggccgaggg

SEQ ID NO: 31219 - DNA, 25 bp, synthetic construct
  misc_feature 1..25: note = Oligonucleotide
  source 1..25: mol_type = other DNA
gctggctgagcgctgcagaggccga

SEQ ID NO: 31220 - DNA, 25 bp, synthetic construct
  misc_feature 1..25: note = Oligonucleotide
  source 1..25: mol_type = other DNA
atcgctggctgagcgctgcagaggc

SEQ ID NO: 31221 - DNA, 25 bp, synthetic construct
  misc_feature 1..25: note = Oligonucleotide
  source 1..25: mol_type = other DNA
gatatcgctggctgagcgctgcaga

SEQ ID NO: 31222 - DNA, 25 bp, synthetic construct
  misc_feature 1..25: note = Oligonucleotide
  source 1..25: mol_type = other DNA
gttgatatcgctggctgagcgctgc

SEQ ID NO: 31223 - DNA, 25 bp, synthetic construct
  misc_feature 1..25: note = Oligonucleotide
  source 1..25: mol_type = other DNA
caggttgatatcgctggctgagcgc

SEQ ID NO: 31224 - DNA, 25 bp, synthetic construct
  misc_feature 1..25: note = Oligonucleotide
  source 1..25: mol_type = other DNA
cttcaggttgatatcgctggctgag

SEQ ID NO: 31225 - DNA, 25 bp, synthetic construct
  misc_feature 1..25: note = Oligonucleotide
  source 1..25: mol_type = other DNA
ccccttcaggttgatatcgctggct

SEQ ID NO: 31226 - DNA, 25 bp, synthetic construct
  misc_feature 1..25: note = Oligonucleotide
  source 1..25: mol_type = other DNA
ctcccccttcaggttgatatcgctg

SEQ ID NO: 31227 - DNA, 25 bp, synthetic construct
  misc_feature 1..25: note = Oligonucleotide
  source 1..25: mol_type = other DNA
tgcctcccccttcaggttgatatcg

SEQ ID NO: 31228 - DNA, 25 bp, synthetic construct
  misc_feature 1..25: note = Oligonucleotide
  source 1..25: mol_type = other DNA
ctgtgcctcccccttcaggttgata

SEQ ID NO: 31229 - DNA, 25 bp, synthetic construct
  misc_feature 1..25: note = Oligonucleotide
  source 1..25: mol_type = other DNA
tggctgtgcctcccccttcaggttg

SEQ ID NO: 31230 - DNA, 25 bp, synthetic construct
  misc_feature 1..25: note = Oligonucleotide
  source 1..25: mol_type = other DNA
tgctggctgtgcctcccccttcagg

SEQ ID NO: 31231 - DNA, 25 bp, synthetic construct
  misc_feature 1..25: note = Oligonucleotide
  source 1..25: mol_type = other DNA
agctgctggctgtgcctcccccttc

SEQ ID NO: 31232 - DNA, 25 bp, synthetic construct
  misc_feature 1..25: note = Oligonucleotide
  source 1..25: mol_type = other DNA
agaagctgctggctgtgcctccccc

SEQ ID NO: 31233 - DNA, 25 bp, synthetic construct
  misc_feature 1..25: note = Oligonucleotide
  source 1..25: mol_type = other DNA
aggagaagctgctggctgtgcctcc

SEQ ID NO: 31234 - DNA, 25 bp, synthetic construct
  misc_feature 1..25: note = Oligonucleotide
  source 1..25: mol_type = other DNA
tccaggagaagctgctggctgtgcc

SEQ ID NO: 31235 - DNA, 25 bp, synthetic construct
  misc_feature 1..25: note = Oligonucleotide
  source 1..25: mol_type = other DNA
gggtccaggagaagctgctggctgt

SEQ ID NO: 31236 - DNA, 25 bp, synthetic construct
  misc_feature 1..25: note = Oligonucleotide
  source 1..25: mol_type = other DNA
cgagggtccaggagaagctgctggc

SEQ ID NO: 31237 - DNA, 25 bp, synthetic construct
  misc_feature 1..25: note = Oligonucleotide
  source 1..25: mol_type = other DNA
cagcgagggtccaggagaagctgct

SEQ ID NO: 31238 - DNA, 25 bp, synthetic construct
  misc_feature 1..25: note = Oligonucleotide
  source 1..25: mol_type = other DNA
tctcagcgagggtccaggagaagct

SEQ ID NO: 31239 - DNA, 25 bp, synthetic construct
  misc_feature 1..25: note = Oligonucleotide
  source 1..25: mol_type = other DNA
gcttctcagcgagggtccaggagaa

SEQ ID NO: 31240 - DNA, 25 bp, synthetic construct
  misc_feature 1..25: note = Oligonucleotide
  source 1..25: mol_type = other DNA
gaggcttctcagcgagggtccagga

SEQ ID NO: 31241 - DNA, 25 bp, synthetic construct
  misc_feature 1..25: note = Oligonucleotide
  source 1..25: mol_type = other DNA
ggggaggcttctcagcgagggtcca

SEQ ID NO: 31242 - DNA, 25 bp, synthetic construct
  misc_feature 1..25: note = Oligonucleotide
  source 1..25: mol_type = other DNA
gtgggggaggcttctcagcgagggt

SEQ ID NO: 31243 - DNA, 25 bp, synthetic construct
  misc_feature 1..25: note = Oligonucleotide
  source 1..25: mol_type = other DNA
ctggtgggggaggcttctcagcgag

SEQ ID NO: 31244 - DNA, 25 bp, synthetic construct
  misc_feature 1..25: note = Oligonucleotide
  source 1..25: mol_type = other DNA
cagctggtgggggaggcttctcagc

SEQ ID NO: 31245 - DNA, 25 bp, synthetic construct
  misc_feature 1..25: note = Oligonucleotide
  source 1..25: mol_type = other DNA
cagcagctggtgggggaggcttctc

SEQ ID NO: 31246 - DNA, 25 bp, synthetic construct
  misc_feature 1..25: note = Oligonucleotide
  source 1..25: mol_type = other DNA
gagcagcagctggtgggggaggctt

SEQ ID NO: 31247 - DNA, 25 bp, synthetic construct
  misc_feature 1..25: note = Oligonucleotide
  source 1..25: mol_type = other DNA
ctggagcagcagctggtgggggagg

SEQ ID NO: 31248 - DNA, 25 bp, synthetic construct
  misc_feature 1..25: note = Oligonucleotide
  source 1..25: mol_type = other DNA
ccgctggagcagcagctggtggggg

SEQ ID NO: 31249 - DNA, 25 bp, synthetic construct
  misc_feature 1..25: note = Oligonucleotide
  source 1..25: mol_type = other DNA
cagccgctggagcagcagctggtgg

SEQ ID NO: 31250 - DNA, 25 bp, synthetic construct
  misc_feature 1..25: note = Oligonucleotide
  source 1..25: mol_type = other DNA
ttgcagccgctggagcagcagctgg

SEQ ID NO: 31251 - DNA, 25 bp, synthetic construct
  misc_feature 1..25: note = Oligonucleotide
  source 1..25: mol_type = other DNA
ctcttgcagccgctggagcagcagc

SEQ ID NO: 31252 - DNA, 25 bp, synthetic construct
  misc_feature 1..25: note = Oligonucleotide
  source 1..25: mol_type = other DNA
ctcctcttgcagccgctggagcagc

SEQ ID NO: 31253 - DNA, 25 bp, synthetic construct
  misc_feature 1..25: note = Oligonucleotide
  source 1..25: mol_type = other DNA
tttctcctcttgcagccgctggagc

SEQ ID NO: 31254 - DNA, 25 bp, synthetic construct
  misc_feature 1..25: note = Oligonucleotide
  source 1..25: mol_type = other DNA
atctttctcctcttgcagccgctgg

SEQ ID NO: 31255 - DNA, 25 bp, synthetic construct
  misc_feature 1..25: note = Oligonucleotide
  source 1..25: mol_type = other DNA
acgatctttctcctcttgcagccgc

SEQ ID NO: 31256 - DNA, 25 bp, synthetic construct
  misc_feature 1..25: note = Oligonucleotide
  source 1..25: mol_type = other DNA
gtcacgatctttctcctcttgcagc

SEQ ID NO: 31257 - DNA, 25 bp, synthetic construct
  misc_feature 1..25: note = Oligonucleotide
  source 1..25: mol_type = other DNA
ccggtcacgatctttctcctcttgc

SEQ ID NO: 31258 - DNA, 25 bp, synthetic construct
  misc_feature 1..25: note = Oligonucleotide
  source 1..25: mol_type = other DNA
atcccggtcacgatctttctcctct

SEQ ID NO: 31259 - DNA, 25 bp, synthetic construct
  misc_feature 1..25: note = Oligonucleotide
  source 1..25: mol_type = other DNA
ggcatcccggtcacgatctttctcc

SEQ ID NO: 31260 - DNA, 25 bp, synthetic construct
  misc_feature 1..25: note = Oligonucleotide
  source 1..25: mol_type = other DNA
gtcggcatcccggtcacgatctttc

SEQ ID NO: 31261 - DNA, 25 bp, synthetic construct
  misc_feature 1..25: note = Oligonucleotide
  source 1..25: mol_type = other DNA
ctggtcggcatcccggtcacgatct

SEQ ID NO: 31262 - DNA, 25 bp, synthetic construct
  misc_feature 1..25: note = Oligonucleotide
  source 1..25: mol_type = other DNA
ctcctggtcggcatcccggtcacga

SEQ ID NO: 31263 - DNA, 25 bp, synthetic construct
  misc_feature 1..25: note = Oligonucleotide
  source 1..25: mol_type = other DNA
gctctcctggtcggcatcccggtca

SEQ ID NO: 31264 - DNA, 25 bp, synthetic construct
  misc_feature 1..25: note = Oligonucleotide
  source 1..25: mol_type = other DNA
gttgctctcctggtcggcatcccgg

SEQ ID NO: 31265 - DNA, 25 bp, synthetic construct
  misc_feature 1..25: note = Oligonucleotide
  source 1..25: mol_type = other DNA
gatgttgctctcctggtcggcatcc

SEQ ID NO: 31266 - DNA, 25 bp, synthetic construct
  misc_feature 1..25: note = Oligonucleotide
  source 1..25: mol_type = other DNA
actgatgttgctctcctggtcggca

SEQ ID NO: 31267 - DNA, 25 bp, synthetic construct
  misc_feature 1..25: note = Oligonucleotide
  source 1..25: mol_type = other DNA
gccactgatgttgctctcctggtcg

SEQ ID NO: 31268 - DNA, 25 bp, synthetic construct
  misc_feature 1..25: note = Oligonucleotide
  source 1..25: mol_type = other DNA
agggccactgatgttgctctcctgg

SEQ ID NO: 31269 - DNA, 25 bp, synthetic construct
  misc_feature 1..25: note = Oligonucleotide
  source 1..25: mol_type = other DNA
taaagggccactgatgttgctctcc

SEQ ID NO: 31270 - DNA, 25 bp, synthetic construct
  misc_feature 1..25: note = Oligonucleotide
  source 1..25: mol_type = other DNA
tgctaaagggccactgatgttgctc

SEQ ID NO: 31271 - DNA, 25 bp, synthetic construct
  misc_feature 1..25: note = Oligonucleotide
  source 1..25: mol_type = other DNA
gcctgctaaagggccactgatgttg

SEQ ID NO: 31272 - DNA, 25 bp, synthetic construct
  misc_feature 1..25: note = Oligonucleotide
  source 1..25: mol_type = other DNA
cctgcctgctaaagggccactgatg

SEQ ID NO: 31273 - DNA, 25 bp, synthetic construct
  misc_feature 1..25: note = Oligonucleotide
  source 1..25: mol_type = other DNA
ggccctgcctgctaaagggccactg

SEQ ID NO: 31274 - DNA, 25 bp, synthetic construct
  misc_feature 1..25: note = Oligonucleotide
  source 1..25: mol_type = other DNA
gccggccctgcctgctaaagggcca

SEQ ID NO: 31275 - DNA, 25 bp, synthetic construct
  misc_feature 1..25: note = Oligonucleotide
  source 1..25: mol_type = other DNA
ttggccggccctgcctgctaaaggg

SEQ ID NO: 31276 - DNA, 25 bp, synthetic construct
  misc_feature 1..25: note = Oligonucleotide
  source 1..25: mol_type = other DNA
gctttggccggccctgcctgctaaa

SEQ ID NO: 31277 - DNA, 25 bp, synthetic construct
  misc_feature 1..25: note = Oligonucleotide
  source 1..25: mol_type = other DNA
cttgctttggccggccctgcctgct

SEQ ID NO: 31278 - DNA, 25 bp, synthetic construct
  misc_feature 1..25: note = Oligonucleotide
  source 1..25: mol_type = other DNA
gatcttgctttggccggccctgcct

SEQ ID NO: 31279 - DNA, 25 bp, synthetic construct
  misc_feature 1..25: note = Oligonucleotide
  source 1..25: mol_type = other DNA
cctgatcttgctttggccggccctg

SEQ ID NO: 31280 - DNA, 25 bp, synthetic construct
  misc_feature 1..25: note = Oligonucleotide
  source 1..25: mol_type = other DNA
ctacctgatcttgctttggccggcc

SEQ ID NO: 31281 - DNA, 25 bp, synthetic construct
  misc_feature 1..25: note = Oligonucleotide
  source 1..25: mol_type = other DNA
ctcctacctgatcttgctttggccg

SEQ ID NO: 31282 - DNA, 25 bp, synthetic construct
  misc_feature 1..25: note = Oligonucleotide
  source 1..25: mol_type = other DNA
cccctcctacctgatcttgctttgg

SEQ ID NO: 31283 - DNA, 25 bp, synthetic construct
  misc_feature 1..25: note = Oligonucleotide
  source 1..25: mol_type = other DNA
agccccctcctacctgatcttgctt

SEQ ID NO: 31284 - DNA, 25 bp, synthetic construct
  misc_feature 1..25: note = Oligonucleotide
  source 1..25: mol_type = other DNA
gccagccccctcctacctgatcttg

SEQ ID NO: 31285 - DNA, 25 bp, synthetic construct
  misc_feature 1..25: note = Oligonucleotide
  source 1..25: mol_type = other DNA
cctgccagccccctcctacctgatc

SEQ ID NO: 31286 - DNA, 25 bp, synthetic construct
  misc_feature 1..25: note = Oligonucleotide
  source 1..25: mol_type = other DNA
gggcctgccagccccctcctacctg

SEQ ID NO: 31287 - DNA, 25 bp, synthetic construct
  misc_feature 1..25: note = Oligonucleotide
  source 1..25: mol_type = other DNA
ccagggcctgccagccccctcctac

SEQ ID NO: 31288 - DNA, 25 bp, synthetic construct
  misc_feature 1..25: note = Oligonucleotide
  source 1..25: mol_type = other DNA
cctccagggcctgccagccccctcc

SEQ ID NO: 31289 - DNA, 25 bp, synthetic construct
  misc_feature 1..25: note = Oligonucleotide
  source 1..25: mol_type = other DNA
acccctccagggcctgccagccccc

SEQ ID NO: 31290 - DNA, 25 bp, synthetic construct
  misc_feature 1..25: note = Oligonucleotide
  source 1..25: mol_type = other DNA
ccaacccctccagggcctgccagcc

SEQ ID NO: 31291 - DNA, 25 bp, synthetic construct
  misc_feature 1..25: note = Oligonucleotide
  source 1..25: mol_type = other DNA
ctcccaacccctccagggcctgcca

SEQ ID NO: 31292 - DNA, 25 bp, synthetic construct
  misc_feature 1..25: note = Oligonucleotide
  source 1..25: mol_type = other DNA
accctcccaacccctccagggcctg

SEQ ID NO: 31293 - DNA, 25 bp, synthetic construct
  misc_feature 1..25: note = Oligonucleotide
  source 1..25: mol_type = other DNA
cccaccctcccaacccctccagggc

SEQ ID NO: 31294 - DNA, 25 bp, synthetic construct
  misc_feature 1..25: note = Oligonucleotide
  source 1..25: mol_type = other DNA
caccccaccctcccaacccctccag

SEQ ID NO: 31295 - DNA, 25 bp, synthetic construct
  misc_feature 1..25: note = Oligonucleotide
  source 1..25: mol_type = other DNA
cggcaccccaccctcccaacccctc

SEQ ID NO: 31296 - DNA, 25 bp, synthetic construct
  misc_feature 1..25: note = Oligonucleotide
  source 1..25: mol_type = other DNA
tcccggcaccccaccctcccaaccc

SEQ ID NO: 31297 - DNA, 25 bp, synthetic construct
  misc_feature 1..25: note = Oligonucleotide
  source 1..25: mol_type = other DNA
aggtcccggcaccccaccctcccaa

SEQ ID NO: 31298 - DNA, 25 bp, synthetic construct
  misc_feature 1..25: note = Oligonucleotide
  source 1..25: mol_type = other DNA
ctcaggtcccggcaccccaccctcc

SEQ ID NO: 31299 - DNA, 25 bp, synthetic construct
  misc_feature 1..25: note = Oligonucleotide
  source 1..25: mol_type = other DNA
tggctcaggtcccggcaccccaccc

SEQ ID NO: 31300 - DNA, 25 bp, synthetic construct
  misc_feature 1..25: note = Oligonucleotide
  source 1..25: mol_type = other DNA
tcctggctcaggtcccggcacccca

SEQ ID NO: 31301 - DNA, 25 bp, synthetic construct
  misc_feature 1..25: note = Oligonucleotide
  source 1..25: mol_type = other DNA
tcctcctggctcaggtcccggcacc

SEQ ID NO: 31302 - DNA, 25 bp, synthetic construct
  misc_feature 1..25: note = Oligonucleotide
  source 1..25: mol_type = other DNA
ggctcctcctggctcaggtcccggc

SEQ ID NO: 31303 - DNA, 25 bp, synthetic construct
  misc_feature 1..25: note = Oligonucleotide
  source 1..25: mol_type = other DNA
gctggctcctcctggctcaggtccc

SEQ ID NO: 31304 - DNA, 25 bp, synthetic construct
  misc_feature 1..25: note = Oligonucleotide
  source 1..25: mol_type = other DNA
ggtgctggctcctcctggctcaggt

SEQ ID NO: 31305 - DNA, 25 bp, synthetic construct
  misc_feature 1..25: note = Oligonucleotide
  source 1..25: mol_type = other DNA
cccggtgctggctcctcctggctca

SEQ ID NO: 31306 - DNA, 25 bp, synthetic construct
  misc_feature 1..25: note = Oligonucleotide
  source 1..25: mol_type = other DNA
cctcccggtgctggctcctcctggc

SEQ ID NO: 31307 - DNA, 25 bp, synthetic construct
  misc_feature 1..25: note = Oligonucleotide
  source 1..25: mol_type = other DNA
ctgcctcccggtgctggctcctcct

SEQ ID NO: 31308 - DNA, 25 bp, synthetic construct
  misc_feature 1..25: note = Oligonucleotide
  source 1..25: mol_type = other DNA
tctctgcctcccggtgctggctcct

SEQ ID NO: 31309 - DNA, 25 bp, synthetic construct
  misc_feature 1..25: note = Oligonucleotide
  source 1..25: mol_type = other DNA
ctctctctgcctcccggtgctggct

SEQ ID NO: 31310 - DNA, 25 bp, synthetic construct
  misc_feature 1..25: note = Oligonucleotide
  source 1..25: mol_type = other DNA
ggcctctctctgcctcccggtgctg

SEQ ID NO: 31311 - DNA, 25 bp, synthetic construct
  misc_feature 1..25: note = Oligonucleotide
  source 1..25: mol_type = other DNA
ccaggcctctctctgcctcccggtg

SEQ ID NO: 31312 - DNA, 25 bp, synthetic construct
  misc_feature 1..25: note = Oligonucleotide
  source 1..25: mol_type = other DNA
ccaccaggcctctctctgcctcccg

SEQ ID NO: 31313 - DNA, 25 bp, synthetic construct
  misc_feature 1..25: note = Oligonucleotide
  source 1..25: mol_type = other DNA
gcaccaccaggcctctctctgcctc

SEQ ID NO: 31314 - DNA, 25 bp, synthetic construct
  misc_feature 1..25: note = Oligonucleotide
  source 1..25: mol_type = other DNA
taggcaccaccaggcctctctctgc

SEQ ID NO: 31315 - DNA, 25 bp, synthetic construct
  misc_feature 1..25: note = Oligonucleotide
  source 1..25: mol_type = other DNA
tgctaggcaccaccaggcctctctc

SEQ ID NO: 31316 - DNA, 25 bp, synthetic construct
  misc_feature 1..25: note = Oligonucleotide
  source 1..25: mol_type = other DNA
aggtgctaggcaccaccaggcctct

SEQ ID NO: 31317 - DNA, 25 bp, synthetic construct
  misc_feature 1..25: note = Oligonucleotide
  source 1..25: mol_type = other DNA
cacaggtgctaggcaccaccaggcc

SEQ ID NO: 31318 - DNA, 25 bp, synthetic construct
  misc_feature 1..25: note = Oligonucleotide
  source 1..25: mol_type = other DNA
ctacacaggtgctaggcaccaccag

SEQ ID NO: 31319 - DNA, 25 bp, synthetic construct
  misc_feature 1..25: note = Oligonucleotide
  source 1..25: mol_type = other DNA
tcactacacaggtgctaggcaccac

SEQ ID NO: 31320 - DNA, 25 bp, synthetic construct
  misc_feature 1..25: note = Oligonucleotide
  source 1..25: mol_type = other DNA
ccatcactacacaggtgctaggcac

SEQ ID NO: 31321 - DNA, 25 bp, synthetic construct
  misc_feature 1..25: note = Oligonucleotide
  source 1..25: mol_type = other DNA
agcccatcactacacaggtgctagg

SEQ ID NO: 31322 - DNA, 25 bp, synthetic construct
  misc_feature 1..25: note = Oligonucleotide
  source 1..25: mol_type = other DNA
cctagcccatcactacacaggtgct

SEQ ID NO: 31323 - DNA, 25 bp, synthetic construct
  misc_feature 1..25: note = Oligonucleotide
  source 1..25: mol_type = other DNA
agccctagcccatcactacacaggt

SEQ ID NO: 31324 - DNA, 25 bp, synthetic construct
  misc_feature 1..25: note = Oligonucleotide
  source 1..25: mol_type = other DNA
ggaagccctagcccatcactacaca

SEQ ID NO: 31325 - DNA, 25 bp, synthetic construct
  misc_feature 1..25: note = Oligonucleotide
  source 1..25: mol_type = other DNA
ccaggaagccctagcccatcactac

SEQ ID NO: 31326 - DNA, 25 bp, synthetic construct
  misc_feature 1..25: note = Oligonucleotide
  source 1..25: mol_type = other DNA
caaccaggaagccctagcccatcac

SEQ ID NO: 31327 - DNA, 25 bp, synthetic construct
  misc_feature 1..25: note = Oligonucleotide
  source 1..25: mol_type = other DNA
ccccaaccaggaagccctagcccat

SEQ ID NO: 31328 - DNA, 25 bp, synthetic construct
  misc_feature 1..25: note = Oligonucleotide
  source 1..25: mol_type = other DNA
cttccccaaccaggaagccctagcc

SEQ ID NO: 31329 - DNA, 25 bp, synthetic construct
  misc_feature 1..25: note = Oligonucleotide
  source 1..25: mol_type = other DNA
tcccttccccaaccaggaagcccta

SEQ ID NO: 31330 - DNA, 25 bp, synthetic construct
  misc_feature 1..25: note = Oligonucleotide
  source 1..25: mol_type = other DNA
tcttcccttccccaaccaggaagcc

SEQ ID NO: 31331 - DNA, 25 bp, synthetic construct
  misc_feature 1..25: note = Oligonucleotide
  source 1..25: mol_type = other DNA
ccttcttcccttccccaaccaggaa

SEQ ID NO: 31332 - DNA, 25 bp, synthetic construct
  misc_feature 1..25: note = Oligonucleotide
  source 1..25: mol_type = other DNA
atgccttcttcccttccccaaccag

SEQ ID NO: 31333 - DNA, 25 bp, synthetic construct
  misc_feature 1..25: note = Oligonucleotide
  source 1..25: mol_type = other DNA
gagatgccttcttcccttccccaac

SEQ ID NO: 31334 - DNA, 25 bp, synthetic construct
  misc_feature 1..25: note = Oligonucleotide
  source 1..25: mol_type = other DNA
ccagagatgccttcttcccttcccc

SEQ ID NO: 31335 - DNA, 25 bp, synthetic construct
  misc_feature 1..25: note = Oligonucleotide
  source 1..25: mol_type = other DNA
cctccagagatgccttcttcccttc

SEQ ID NO: 31336 - DNA, 25 bp, synthetic construct
  misc_feature 1..25: note = Oligonucleotide
  source 1..25: mol_type = other DNA
ccacctccagagatgccttcttccc

SEQ ID NO: 31337 - DNA, 25 bp, synthetic construct
  misc_feature 1..25: note = Oligonucleotide
  source 1..25: mol_type = other DNA
tccccacctccagagatgccttctt

SEQ ID NO: 31338 - DNA, 25 bp, synthetic construct
  misc_feature 1..25: note = Oligonucleotide
  source 1..25: mol_type = other DNA
ctgtccccacctccagagatgcctt

SEQ ID NO: 31339 - DNA, 25 bp, synthetic construct
  misc_feature 1..25: note = Oligonucleotide
  source 1..25: mol_type = other DNA
tgcctgtccccacctccagagatgc

SEQ ID NO: 31340 - DNA, 25 bp, synthetic construct
  misc_feature 1..25: note = Oligonucleotide
  source 1..25: mol_type = other DNA
atgtgcctgtccccacctccagaga

SEQ ID NO: 31341 - DNA, 25 bp, synthetic construct
  misc_feature 1..25: note = Oligonucleotide
  source 1..25: mol_type = other DNA
tgcatgtgcctgtccccacctccag

SEQ ID NO: 31342 - DNA, 25 bp, synthetic construct
  misc_feature 1..25: note = Oligonucleotide
  source 1..25: mol_type = other DNA
gcgtgcatgtgcctgtccccacctc

SEQ ID NO: 31343 - DNA, 25 bp, synthetic construct
  misc_feature 1..25: note = Oligonucleotide
  source 1..25: mol_type = other DNA
tcagcgtgcatgtgcctgtccccac

SEQ ID NO: 31344 - DNA, 25 bp, synthetic construct
  misc_feature 1..25: note = Oligonucleotide
  source 1..25: mol_type = other DNA
aaatcagcgtgcatgtgcctgtccc

SEQ ID NO: 31345 - DNA, 25 bp, synthetic construct
  misc_feature 1..25: note = Oligonucleotide
  source 1..25: mol_type = other DNA
cggaaatcagcgtgcatgtgcctgt

SEQ ID NO: 31346 - DNA, 25 bp, synthetic construct
  misc_feature 1..25: note = Oligonucleotide
  source 1..25: mol_type = other DNA
aaccggaaatcagcgtgcatgtgcc

SEQ ID NO: 31347 - DNA, 25 bp, synthetic construct
  misc_feature 1..25: note = Oligonucleotide
  source 1..25: mol_type = other DNA
tccaaccggaaatcagcgtgcatgt

SEQ ID NO: 31348 - DNA, 25 bp, synthetic construct
  misc_feature 1..25: note = Oligonucleotide
  source 1..25: mol_type = other DNA
agctccaaccggaaatcagcgtgca

SEQ ID NO: 31349 - DNA, 25 bp, synthetic construct
  misc_feature 1..25: note = Oligonucleotide
  source 1..25: mol_type = other DNA
cccagctccaaccggaaatcagcgt

SEQ ID NO: 31350 - DNA, 25 bp, synthetic construct
  misc_feature 1..25: note = Oligonucleotide
  source 1..25: mol_type = other DNA
aagcccagctccaaccggaaatcag

SEQ ID NO: 31351 - DNA, 25 bp, synthetic construct
  misc_feature 1..25: note = Oligonucleotide
  source 1..25: mol_type = other DNA
ggcaagcccagctccaaccggaaat

SEQ ID NO: 31352 - DNA, 25 bp, synthetic construct
  misc_feature 1..25: note = Oligonucleotide
  source 1..25: mol_type = other DNA
catggcaagcccagctccaaccgga

SEQ ID NO: 31353 - DNA, 25 bp, synthetic construct
  misc_feature 1..25: note = Oligonucleotide
  source 1..25: mol_type = other DNA
cctcatggcaagcccagctccaacc

SEQ ID NO: 31354 - DNA, 25 bp, synthetic construct
  misc_feature 1..25: note = Oligonucleotide
  source 1..25: mol_type = other DNA
tgtcctcatggcaagcccagctcca

SEQ ID NO: 31355 - DNA, 25 bp, synthetic construct
  misc_feature 1..25: note = Oligonucleotide
  source 1..25: mol_type = other DNA
cactgtcctcatggcaagcccagct

SEQ ID NO: 31356 - DNA, 25 bp, synthetic construct
  misc_feature 1..25: note = Oligonucleotide
  source 1..25: mol_type = other DNA
gcccactgtcctcatggcaagccca

SEQ ID NO: 31357 - DNA, 25 bp, synthetic construct
  misc_feature 1..25: note = Oligonucleotide
  source 1..25: mol_type = other DNA
actgcccactgtcctcatggcaagc

SEQ ID NO: 31358 - DNA, 25 bp, synthetic construct
  misc_feature 1..25: note = Oligonucleotide
  source 1..25: mol_type = other DNA
tcaactgcccactgtcctcatggca

SEQ ID NO: 31359 - DNA, 25 bp, synthetic construct
  misc_feature 1..25: note = Oligonucleotide
  source 1..25: mol_type = other DNA
ccctcaactgcccactgtcctcatg

SEQ ID NO: 31360 - DNA, 25 bp, synthetic construct
  misc_feature 1..25: note = Oligonucleotide
  source 1..25: mol_type = other DNA
gctccctcaactgcccactgtcctc

SEQ ID NO: 31361 - DNA, 25 bp, synthetic construct
  misc_feature 1..25: note = Oligonucleotide
  source 1..25: mol_type = other DNA
cacgctccctcaactgcccactgtc

SEQ ID NO: 31362 - DNA, 25 bp, synthetic construct
  misc_feature 1..25: note = Oligonucleotide
  source 1..25: mol_type = other DNA
taacacgctccctcaactgcccact

SEQ ID NO: 31363 - DNA, 25 bp, synthetic construct
  misc_feature 1..25: note = Oligonucleotide
  source 1..25: mol_type = other DNA
acctaacacgctccctcaactgccc

SEQ ID NO: 31364 - DNA, 25 bp, synthetic construct
  misc_feature 1..25: note = Oligonucleotide
  source 1..25: mol_type = other DNA
tccacctaacacgctccctcaactg

SEQ ID NO: 31365 - DNA, 25 bp, synthetic construct
  misc_feature 1..25: note = Oligonucleotide
  source 1..25: mol_type = other DNA
ctctccacctaacacgctccctcaa

SEQ ID NO: 31366 - DNA, 25 bp, synthetic construct
  misc_feature 1..25: note = Oligonucleotide
  source 1..25: mol_type = other DNA
accctctccacctaacacgctccct

SEQ ID NO: 31367 - DNA, 25 bp, synthetic construct
  misc_feature 1..25: note = Oligonucleotide
  source 1..25: mol_type = other DNA
cataccctctccacctaacacgctc

SEQ ID NO: 31368 - DNA, 25 bp, synthetic construct
  misc_feature 1..25: note = Oligonucleotide
  source 1..25: mol_type = other DNA
gagcataccctctccacctaacacg

SEQ ID NO: 31369 - DNA, 25 bp, synthetic construct
  misc_feature 1..25: note = Oligonucleotide
  source 1..25: mol_type = other DNA
taggagcataccctctccacctaac

SEQ ID NO: 31370 - DNA, 25 bp, synthetic construct
  misc_feature 1..25: note = Oligonucleotide
  source 1..25: mol_type = other DNA
aggtaggagcataccctctccacct

SEQ ID NO: 31371 - DNA, 25 bp, synthetic construct
  misc_feature 1..25: note = Oligonucleotide
  source 1..25: mol_type = other DNA
cacaggtaggagcataccctctcca

SEQ ID NO: 31372 - DNA, 25 bp, synthetic construct
  misc_feature 1..25: note = Oligonucleotide
  source 1..25: mol_type = other DNA
aatcacaggtaggagcataccctct

SEQ ID NO: 31373 - DNA, 25 bp, synthetic construct
  misc_feature 1..25: note = Oligonucleotide
  source 1..25: mol_type = other DNA
ctaaatcacaggtaggagcataccc

SEQ ID NO: 31374 - DNA, 25 bp, synthetic construct
  misc_feature 1..25: note = Oligonucleotide
  source 1..25: mol_type = other DNA
tttctaaatcacaggtaggagcata

SEQ ID NO: 31375 - DNA, 25 bp, synthetic construct
  misc_feature 1..25: note = Oligonucleotide
  source 1..25: mol_type = other DNA
tgttttctaaatcacaggtaggagc

SEQ ID NO: 31376 - DNA, 25 bp, synthetic construct
  misc_feature 1..25: note = Oligonucleotide
  source 1..25: mol_type = other DNA
gtgtgttttctaaatcacaggtagg

SEQ ID NO: 31377 - DNA, 25 bp, synthetic construct
  misc_feature 1..25: note = Oligonucleotide
  source 1..25: mol_type = other DNA
gcagtgtgttttctaaatcacaggt

SEQ ID NO: 31378 - DNA, 25 bp, synthetic construct
  misc_feature 1..25: note = Oligonucleotide
  source 1..25: mol_type = other DNA
aatgcagtgtgttttctaaatcaca

SEQ ID NO: 31379 - DNA, 25 bp, synthetic construct
  misc_feature 1..25: note = Oligonucleotide
  source 1..25: mol_type = other DNA
gacaatgcagtgtgttttctaaatc

SEQ ID NO: 31380 - DNA, 25 bp, synthetic construct
  misc_feature 1..25: note = Oligonucleotide
  source 1..25: mol_type = other DNA
cctgacaatgcagtgtgttttctaa

SEQ ID NO: 31381 - DNA, 25 bp, synthetic construct
  misc_feature 1..25: note = Oligonucleotide
  source 1..25: mol_type = other DNA
atgcctgacaatgcagtgtgttttc

SEQ ID NO: 31382 - DNA, 25 bp, synthetic construct
  misc_feature 1..25: note = Oligonucleotide
  source 1..25: mol_type = other DNA
gccatgcctgacaatgcagtgtgtt

SEQ ID NO: 31383 - DNA, 25 bp, synthetic construct
  misc_feature 1..25: note = Oligonucleotide
  source 1..25: mol_type = other DNA
ccagccatgcctgacaatgcagtgt

SEQ ID NO: 31384 - DNA, 25 bp, synthetic construct
  misc_feature 1..25: note = Oligonucleotide
  source 1..25: mol_type = other DNA
ttcccagccatgcctgacaatgcag

SEQ ID NO: 31385 - DNA, 25 bp, synthetic construct
  misc_feature 1..25: note = Oligonucleotide
  source 1..25: mol_type = other DNA
ctcttcccagccatgcctgacaatg

SEQ ID NO: 31386 - DNA, 25 bp, synthetic construct
  misc_feature 1..25: note = Oligonucleotide
  source 1..25: mol_type = other DNA
tgactcttcccagccatgcctgaca

SEQ ID NO: 31387 - DNA, 25 bp, synthetic construct
  misc_feature 1..25: note = Oligonucleotide
  source 1..25: mol_type = other DNA
ccctgactcttcccagccatgcctg

SEQ ID NO: 31388 - DNA, 25 bp, synthetic construct
  misc_feature 1..25: note = Oligonucleotide
  source 1..25: mol_type = other DNA
cagccctgactcttcccagccatgc

SEQ ID NO: 31389 - DNA, 25 bp, synthetic construct
  misc_feature 1..25: note = Oligonucleotide
  source 1..25: mol_type = other DNA
caccagccctgactcttcccagcca

SEQ ID NO: 31390 - DNA, 25 bp, synthetic construct
  misc_feature 1..25: note = Oligonucleotide
  source 1..25: mol_type = other DNA
ggccaccagccctgactcttcccag

SEQ ID NO: 31391 - DNA, 25 bp, synthetic construct
  misc_feature 1..25: note = Oligonucleotide
  source 1..25: mol_type = other DNA
acaggccaccagccctgactcttcc

SEQ ID NO: 31392 - DNA, 25 bp, synthetic construct
  misc_feature 1..25: note = Oligonucleotide
  source 1..25: mol_type = other DNA
accacaggccaccagccctgactct

SEQ ID NO: 31393 - DNA, 25 bp, synthetic construct
  misc_feature 1..25: note = Oligonucleotide
  source 1..25: mol_type = other DNA
cttaccacaggccaccagccctgac

SEQ ID NO: 31394 - DNA, 25 bp, synthetic construct
  misc_feature 1..25: note = Oligonucleotide
  source 1..25: mol_type = other DNA
ccccttaccacaggccaccagccct

SEQ ID NO: 31395 - DNA, 25 bp, synthetic construct
  misc_feature 1..25: note = Oligonucleotide
  source 1..25: mol_type = other DNA
gtcccccttaccacaggccaccagc

SEQ ID NO: 31396 - DNA, 25 bp, synthetic construct
  misc_feature 1..25: note = Oligonucleotide
  source 1..25: mol_type = other DNA
cctgtcccccttaccacaggccacc

SEQ ID NO: 31397 - DNA, 25 bp, synthetic construct
  misc_feature 1..25: note = Oligonucleotide
  source 1..25: mol_type = other DNA
atccctgtcccccttaccacaggcc

SEQ ID NO: 31398 - DNA, 25 bp, synthetic construct
  misc_feature 1..25: note = Oligonucleotide
  source 1..25: mol_type = other DNA
tccatccctgtcccccttaccacag

SEQ ID NO: 31399 - DNA, 25 bp, synthetic construct
  misc_feature 1..25: note = Oligonucleotide
  source 1..25: mol_type = other DNA
aactccatccctgtcccccttacca

SEQ ID NO: 31400 - DNA, 25 bp, synthetic construct
  misc_feature 1..25: note = Oligonucleotide
  source 1..25: mol_type = other DNA
ggcaactccatccctgtccccctta

SEQ ID NO: 31401 - DNA, 25 bp, synthetic construct
  misc_feature 1..25: note = Oligonucleotide
  source 1..25: mol_type = other DNA
agtggcaactccatccctgtccccc

SEQ ID NO: 31402 - DNA, 25 bp, synthetic construct
  misc_feature 1..25: note = Oligonucleotide
  source 1..25: mol_type = other DNA
tggagtggcaactccatccctgtcc

SEQ ID NO: 31403 - DNA, 25 bp, synthetic construct
  misc_feature 1..25: note = Oligonucleotide
  source 1..25: mol_type = other DNA
tactggagtggcaactccatccctg

SEQ ID NO: 31404 - DNA, 25 bp, synthetic construct
  misc_feature 1..25: note = Oligonucleotide
  source 1..25: mol_type = other DNA
ccctactggagtggcaactccatcc

SEQ ID NO: 31405 - DNA, 25 bp, synthetic construct
  misc_feature 1..25: note = Oligonucleotide
  source 1..25: mol_type = other DNA
gggccctactggagtggcaactcca

SEQ ID NO: 31406 - DNA, 25 bp, synthetic construct
  misc_feature 1..25: note = Oligonucleotide
  source 1..25: mol_type = other DNA
tttgggccctactggagtggcaact

SEQ ID NO: 31407 - DNA, 25 bp, synthetic construct
  misc_feature 1..25: note = Oligonucleotide
  source 1..25: mol_type = other DNA
ggttttgggccctactggagtggca

SEQ ID NO: 31408 - DNA, 25 bp, synthetic construct
  misc_feature 1..25: note = Oligonucleotide
  source 1..25: mol_type = other DNA
gtaggttttgggccctactggagtg

SEQ ID NO: 31409 - DNA, 25 bp, synthetic construct
  misc_feature 1..25: note = Oligonucleotide
  source 1..25: mol_type = other DNA
cctgtaggttttgggccctactgga

SEQ ID NO: 31410 - DNA, 25 bp, synthetic construct
  misc_feature 1..25: note = Oligonucleotide
  source 1..25: mol_type = other DNA
ttacctgtaggttttgggccctact

SEQ ID NO: 31411 - DNA, 25 bp, synthetic construct
  misc_feature 1..25: note = Oligonucleotide
  source 1..25: mol_type = other DNA
ggcttacctgtaggttttgggccct

SEQ ID NO: 31412 - DNA, 25 bp, synthetic construct
  misc_feature 1..25: note = Oligonucleotide
  source 1..25: mol_type = other DNA
tggggcttacctgtaggttttgggc

SEQ ID NO: 31413 - DNA, 25 bp, synthetic construct
  misc_feature 1..25: note = Oligonucleotide
  source 1..25: mol_type = other DNA
ggctggggcttacctgtaggttttg

SEQ ID NO: 31414 - DNA, 25 bp, synthetic construct
  misc_feature 1..25: note = Oligonucleotide
  source 1..25: mol_type = other DNA
cagggctggggcttacctgtaggtt

SEQ ID NO: 31415 - DNA, 25 bp, synthetic construct
  misc_feature 1..25: note = Oligonucleotide
  source 1..25: mol_type = other DNA
ggacagggctggggcttacctgtag

SEQ ID NO: 31416 - DNA, 25 bp, synthetic construct
  misc_feature 1..25: note = Oligonucleotide
  source 1..25: mol_type = other DNA
tggggacagggctggggcttacctg

SEQ ID NO: 31417 - DNA, 25 bp, synthetic construct
  misc_feature 1..25: note = Oligonucleotide
  source 1..25: mol_type = other DNA
ccctggggacagggctggggcttac

SEQ ID NO: 31418 - DNA, 25 bp, synthetic construct
  misc_feature 1..25: note = Oligonucleotide
  source 1..25: mol_type = other DNA
ataccctggggacagggctggggct

SEQ ID NO: 31419 - DNA, 25 bp, synthetic construct
  misc_feature 1..25: note = Oligonucleotide
  source 1..25: mol_type = other DNA
agtataccctggggacagggctggg

SEQ ID NO: 31420 - DNA, 25 bp, synthetic construct
  misc_feature 1..25: note = Oligonucleotide
  source 1..25: mol_type = other DNA
atgagtataccctggggacagggct

SEQ ID NO: 31421 - DNA, 25 bp, synthetic construct
  misc_feature 1..25: note = Oligonucleotide
  source 1..25: mol_type = other DNA
accatgagtataccctggggacagg

SEQ ID NO: 31422 - DNA, 25 bp, synthetic construct
  misc_feature 1..25: note = Oligonucleotide
  source 1..25: mol_type = other DNA
gaaaccatgagtataccctggggac

SEQ ID NO: 31423 - DNA, 25 bp, synthetic construct
  misc_feature 1..25: note = Oligonucleotide
  source 1..25: mol_type = other DNA
ggggaaaccatgagtataccctggg

SEQ ID NO: 31424 - DNA, 25 bp, synthetic construct
  misc_feature 1..25: note = Oligonucleotide
  source 1..25: mol_type = other DNA
ctgggggaaaccatgagtataccct

SEQ ID NO: 31425 - DNA, 25 bp, synthetic construct
  misc_feature 1..25: note = Oligonucleotide
  source 1..25: mol_type = other DNA
gggctgggggaaaccatgagtatac

SEQ ID NO: 31426 - DNA, 25 bp, synthetic construct
  misc_feature 1..25: note = Oligonucleotide
  source 1..25: mol_type = other DNA
ccagggctgggggaaaccatgagta

SEQ ID NO: 31427 - DNA, 25 bp, synthetic construct
  misc_feature 1..25: note = Oligonucleotide
  source 1..25: mol_type = other DNA
gtgccagggctgggggaaaccatga

SEQ ID NO: 31428 - DNA, 25 bp, synthetic construct
  misc_feature 1..25: note = Oligonucleotide
  source 1..25: mol_type = other DNA
ggtgtgccagggctgggggaaacca

SEQ ID NO: 31429 - DNA, 25 bp, synthetic construct
  misc_feature 1..25: note = Oligonucleotide
  source 1..25: mol_type = other DNA
gtaggtgtgccagggctgggggaaa

SEQ ID NO: 31430 - DNA, 25 bp, synthetic construct
  misc_feature 1..25: note = Oligonucleotide
  source 1..25: mol_type = other DNA
cctgtaggtgtgccagggctggggg

SEQ ID NO: 31431 - DNA, 25 bp, synthetic construct
  misc_feature 1..25: note = Oligonucleotide
  source 1..25: mol_type = other DNA
agtcctgtaggtgtgccagggctgg

SEQ ID NO: 31432 - DNA, 25 bp, synthetic construct
  misc_feature 1..25: note = Oligonucleotide
  source 1..25: mol_type = other DNA
cagagtcctgtaggtgtgccagggc

SEQ ID NO: 31433 - DNA, 25 bp, synthetic construct
  misc_feature 1..25: note = Oligonucleotide
  source 1..25: mol_type = other DNA
ccacagagtcctgtaggtgtgccag

SEQ ID NO: 31434 - DNA, 25 bp, synthetic construct
  misc_feature 1..25: note = Oligonucleotide
  source 1..25: mol_type = other DNA
aagccacagagtcctgtaggtgtgc

SEQ ID NO: 31435 - DNA, 25 bp, synthetic construct
  misc_feature 1..25: note = Oligonucleotide
  source 1..25: mol_type = other DNA
tagaagccacagagtcctgtaggtg

SEQ ID NO: 31436 - DNA, 25 bp, synthetic construct
  misc_feature 1..25: note = Oligonucleotide
  source 1..25: mol_type = other DNA
gaatagaagccacagagtcctgtag

SEQ ID NO: 31437 - DNA, 25 bp, synthetic construct
  misc_feature 1..25: note = Oligonucleotide
  source 1..25: mol_type = other DNA
aaagaatagaagccacagagtcctg

SEQ ID NO: 31438 - DNA, 25 bp, synthetic construct
  misc_feature 1..25: note = Oligonucleotide
  source 1..25: mol_type = other DNA
ggtaaagaatagaagccacagagtc

SEQ ID NO: 31439 - DNA, 25 bp, synthetic construct
  misc_feature 1..25: note = Oligonucleotide
  source 1..25: mol_type = other DNA
gagggtaaagaatagaagccacaga

SEQ ID NO: 31440 - DNA, 25 bp, synthetic construct
  misc_feature 1..25: note = Oligonucleotide
  source 1..25: mol_type = other DNA
ggtgagggtaaagaatagaagccac

SEQ ID NO: 31441 - DNA, 25 bp, synthetic construct
  misc_feature 1..25: note = Oligonucleotide
  source 1..25: mol_type = other DNA
cagggtgagggtaaagaatagaagc

SEQ ID NO: 31442 - DNA, 25 bp, synthetic construct
  misc_feature 1..25: note = Oligonucleotide
  source 1..25: mol_type = other DNA
cctcagggtgagggtaaagaataga

SEQ ID NO: 31443 - DNA, 25 bp, synthetic construct
  misc_feature 1..25: note = Oligonucleotide
  source 1..25: mol_type = other DNA
aggcctcagggtgagggtaaagaat

SEQ ID NO: 31444 - DNA, 25 bp, synthetic construct
  misc_feature 1..25: note = Oligonucleotide
  source 1..25: mol_type = other DNA
cccaggcctcagggtgagggtaaag

SEQ ID NO: 31445 - DNA, 25 bp, synthetic construct
  misc_feature 1..25: note = Oligonucleotide
  source 1..25: mol_type = other DNA
ggacccaggcctcagggtgagggta

SEQ ID NO: 31446 - DNA, 25 bp, synthetic construct
  misc_feature 1..25: note = Oligonucleotide
  source 1..25: mol_type = other DNA
cagggacccaggcctcagggtgagg

SEQ ID NO: 31447 - DNA, 25 bp, synthetic construct
  misc_feature 1..25: note = Oligonucleotide
  source 1..25: mol_type = other DNA
cctcagggacccaggcctcagggtg

SEQ ID NO: 31448 - DNA, 25 bp, synthetic construct
  misc_feature 1..25: note = Oligonucleotide
  source 1..25: mol_type = other DNA
ctgcctcagggacccaggcctcagg

SEQ ID NO: 31449 - DNA, 25 bp, synthetic construct
  misc_feature 1..25: note = Oligonucleotide
  source 1..25: mol_type = other DNA
tccctgcctcagggacccaggcctc

SEQ ID NO: 31450 - DNA, 25 bp, synthetic construct
  misc_feature 1..25: note = Oligonucleotide
  source 1..25: mol_type = other DNA
gcatccctgcctcagggacccaggc

SEQ ID NO: 31451 - DNA, 25 bp, synthetic construct
  misc_feature 1..25: note = Oligonucleotide
  source 1..25: mol_type = other DNA
caggcatccctgcctcagggaccca

SEQ ID NO: 31452 - DNA, 25 bp, synthetic construct
  misc_feature 1..25: note = Oligonucleotide
  source 1..25: mol_type = other DNA
gtccaggcatccctgcctcagggac

SEQ ID NO: 31453 - DNA, 25 bp, synthetic construct
  misc_feature 1..25: note = Oligonucleotide
  source 1..25: mol_type = other DNA
ccggtccaggcatccctgcctcagg

SEQ ID NO: 31454 - DNA, 25 bp, synthetic construct
  misc_feature 1..25: note = Oligonucleotide
  source 1..25: mol_type = other DNA
gctccggtccaggcatccctgcctc

SEQ ID NO: 31455 - DNA, 25 bp, synthetic construct
  misc_feature 1..25: note = Oligonucleotide
  source 1..25: mol_type = other DNA
tgggctccggtccaggcatccctgc

SEQ ID NO: 31456 - DNA, 25 bp, synthetic construct
  misc_feature 1..25: note = Oligonucleotide
  source 1..25: mol_type = other DNA
cagtgggctccggtccaggcatccc

SEQ ID NO: 31457 - DNA, 25 bp, synthetic construct
  misc_feature 1..25: note = Oligonucleotide
  source 1..25: mol_type = other DNA
ggccagtgggctccggtccaggcat

SEQ ID NO: 31458 - DNA, 25 bp, synthetic construct
  misc_feature 1..25: note = Oligonucleotide
  source 1..25: mol_type = other DNA
agaggccagtgggctccggtccagg

SEQ ID NO: 31459 - DNA, 25 bp, synthetic construct
  misc_feature 1..25: note = Oligonucleotide
  source 1..25: mol_type = other DNA
cagagaggccagtgggctccggtcc

SEQ ID NO: 31460 - DNA, 25 bp, synthetic construct
  misc_feature 1..25: note = Oligonucleotide
  source 1..25: mol_type = other DNA
gcccagagaggccagtgggctccgg

SEQ ID NO: 31461 - DNA, 25 bp, synthetic construct
  misc_feature 1..25: note = Oligonucleotide
  source 1..25: mol_type = other DNA
acagcccagagaggccagtgggctc

SEQ ID NO: 31462 - DNA, 25 bp, synthetic construct
  misc_feature 1..25: note = Oligonucleotide
  source 1..25: mol_type = other DNA
tgcacagcccagagaggccagtggg

SEQ ID NO: 31463 - DNA, 25 bp, synthetic construct
  misc_feature 1..25: note = Oligonucleotide
  source 1..25: mol_type = other DNA
caatgcacagcccagagaggccagt

SEQ ID NO: 31464 - DNA, 25 bp, synthetic construct
  misc_feature 1..25: note = Oligonucleotide
  source 1..25: mol_type = other DNA
acccaatgcacagcccagagaggcc

SEQ ID NO: 31465 - DNA, 25 bp, synthetic construct
  misc_feature 1..25: note = Oligonucleotide
  source 1..25: mol_type = other DNA
agcacccaatgcacagcccagagag

SEQ ID NO: 31466 - DNA, 25 bp, synthetic construct
  misc_feature 1..25: note = Oligonucleotide
  source 1..25: mol_type = other DNA
ctcagcacccaatgcacagcccaga

SEQ ID NO: 31467 - DNA, 25 bp, synthetic construct
  misc_feature 1..25: note = Oligonucleotide
  source 1..25: mol_type = other DNA
cacctcagcacccaatgcacagccc

SEQ ID NO: 31468 - DNA, 25 bp, synthetic construct
  misc_feature 1..25: note = Oligonucleotide
  source 1..25: mol_type = other DNA
gcccacctcagcacccaatgcacag

SEQ ID NO: 31469 - DNA, 25 bp, synthetic construct
  misc_feature 1..25: note = Oligonucleotide
  source 1..25: mol_type = other DNA
tgcgcccacctcagcacccaatgca

SEQ ID NO: 31470 - DNA, 25 bp, synthetic construct
  misc_feature 1..25: note = Oligonucleotide
  source 1..25: mol_type = other DNA
cagtgcgcccacctcagcacccaat

SEQ ID NO: 31471 - DNA, 25 bp, synthetic construct
  misc_feature 1..25: note = Oligonucleotide
  source 1..25: mol_type = other DNA
agccagtgcgcccacctcagcaccc

SEQ ID NO: 31472 - DNA, 25 bp, synthetic construct
  misc_feature 1..25: note = Oligonucleotide
  source 1..25: mol_type = other DNA
gagagccagtgcgcccacctcagca

SEQ ID NO: 31473 - DNA, 25 bp, synthetic construct
  misc_feature 1..25: note = Oligonucleotide
  source 1..25: mol_type = other DNA
gctgagagccagtgcgcccacctca

SEQ ID NO: 31474 - DNA, 25 bp, synthetic construct
  misc_feature 1..25: note = Oligonucleotide
  source 1..25: mol_type = other DNA
gtggctgagagccagtgcgcccacc

SEQ ID NO: 31475 - DNA, 25 bp, synthetic construct
  misc_feature 1..25: note = Oligonucleotide
  source 1..25: mol_type = other DNA
aaagtggctgagagccagtgcgccc

SEQ ID NO: 31476 - DNA, 25 bp, synthetic construct
  misc_feature 1..25: note = Oligonucleotide
  source 1..25: mol_type = other DNA
cacaaagtggctgagagccagtgcg

SEQ ID NO: 31477 - DNA, 25 bp, synthetic construct
  misc_feature 1..25: note = Oligonucleotide
  source 1..25: mol_type = other DNA
aggcacaaagtggctgagagccagt

SEQ ID NO: 31478 - DNA, 25 bp, synthetic construct
  misc_feature 1..25: note = Oligonucleotide
  source 1..25: mol_type = other DNA
cccaggcacaaagtggctgagagcc

SEQ ID NO: 31479 - DNA, 25 bp, synthetic construct
  misc_feature 1..25: note = Oligonucleotide
  source 1..25: mol_type = other DNA
aagcccaggcacaaagtggctgaga

SEQ ID NO: 31480 - DNA, 25 bp, synthetic construct
  misc_feature 1..25: note = Oligonucleotide
  source 1..25: mol_type = other DNA
gagaagcccaggcacaaagtggctg

SEQ ID NO: 31481 - DNA, 25 bp, synthetic construct
  misc_feature 1..25: note = Oligonucleotide
  source 1..25: mol_type = other DNA
gatgagaagcccaggcacaaagtgg

SEQ ID NO: 31482 - DNA, 25 bp, synthetic construct
  misc_feature 1..25: note = Oligonucleotide
  source 1..25: mol_type = other DNA
actgatgagaagcccaggcacaaag

SEQ ID NO: 31483 - DNA, 25 bp, synthetic construct
  misc_feature 1..25: note = Oligonucleotide
  source 1..25: mol_type = other DNA
cttactgatgagaagcccaggcaca

SEQ ID NO: 31484 - DNA, 25 bp, synthetic construct
  misc_feature 1..25: note = Oligonucleotide
  source 1..25: mol_type = other DNA
ccacttactgatgagaagcccaggc

SEQ ID NO: 31485 - DNA, 25 bp, synthetic construct
  misc_feature 1..25: note = Oligonucleotide
  source 1..25: mol_type = other DNA
ttcccacttactgatgagaagccca

SEQ ID NO: 31486 - DNA, 25 bp, synthetic construct
  misc_feature 1..25: note = Oligonucleotide
  source 1..25: mol_type = other DNA
ctattcccacttactgatgagaagc

SEQ ID NO: 31487 - DNA, 25 bp, synthetic construct
  misc_feature 1..25: note = Oligonucleotide
  source 1..25: mol_type = other DNA
ggactattcccacttactgatgaga

SEQ ID NO: 31488 - DNA, 25 bp, synthetic construct
  misc_feature 1..25: note = Oligonucleotide
  source 1..25: mol_type = other DNA
gtaggactattcccacttactgatg

SEQ ID NO: 31489 - DNA, 25 bp, synthetic construct
  misc_feature 1..25: note = Oligonucleotide
  source 1..25: mol_type = other DNA
taggtaggactattcccacttactg

SEQ ID NO: 31490 - DNA, 25 bp, synthetic construct
  misc_feature 1..25: note = Oligonucleotide
  source 1..25: mol_type = other DNA
acttaggtaggactattcccactta

SEQ ID NO: 31491 - DNA, 25 bp, synthetic construct
  misc_feature 1..25: note = Oligonucleotide
  source 1..25: mol_type = other DNA
atgacttaggtaggactattcccac

SEQ ID NO: 31492 - DNA, 25 bp, synthetic construct
  misc_feature 1..25: note = Oligonucleotide
  source 1..25: mol_type = other DNA
acaatgacttaggtaggactattcc

SEQ ID NO: 31493 - DNA, 25 bp, synthetic construct
  misc_feature 1..25: note = Oligonucleotide
  source 1..25: mol_type = other DNA
aagacaatgacttaggtaggactat

SEQ ID NO: 31494 - DNA, 25 bp, synthetic construct
  misc_feature 1..25: note = Oligonucleotide
  source 1..25: mol_type = other DNA
ccaaagacaatgacttaggtaggac

SEQ ID NO: 31495 - DNA, 25 bp, synthetic construct
  misc_feature 1..25: note = Oligonucleotide
  source 1..25: mol_type = other DNA
ttcccaaagacaatgacttaggtag

SEQ ID NO: 31496 - DNA, 25 bp, synthetic construct
  misc_feature 1..25: note = Oligonucleotide
  source 1..25: mol_type = other DNA
ggcttcccaaagacaatgacttagg

SEQ ID NO: 31497 - DNA, 25 bp, synthetic construct
  misc_feature 1..25: note = Oligonucleotide
  source 1..25: mol_type = other DNA
gaaggcttcccaaagacaatgactt

SEQ ID NO: 31498 - DNA, 25 bp, synthetic construct
  misc_feature 1..25: note = Oligonucleotide
  source 1..25: mol_type = other DNA
ctggaaggcttcccaaagacaatga

SEQ ID NO: 31499 - DNA, 25 bp, synthetic construct
  misc_feature 1..25: note = Oligonucleotide
  source 1..25: mol_type = other DNA
attctggaaggcttcccaaagacaa

SEQ ID NO: 31500 - DNA, 25 bp, synthetic construct
  misc_feature 1..25: note = Oligonucleotide
  source 1..25: mol_type = other DNA
ggcattctggaaggcttcccaaaga

SEQ ID NO: 31501 - DNA, 25 bp, synthetic construct
  misc_feature 1..25: note = Oligonucleotide
  source 1..25: mol_type = other DNA
cagggcattctggaaggcttcccaa

SEQ ID NO: 31502 - DNA, 25 bp, synthetic construct
  misc_feature 1..25: note = Oligonucleotide
  source 1..25: mol_type = other DNA
gcccagggcattctggaaggcttcc

SEQ ID NO: 31503 - DNA, 25 bp, synthetic construct
  misc_feature 1..25: note = Oligonucleotide
  source 1..25: mol_type = other DNA
cctgcccagggcattctggaaggct

SEQ ID NO: 31504 - DNA, 25 bp, synthetic construct
  misc_feature 1..25: note = Oligonucleotide
  source 1..25: mol_type = other DNA
tcacctgcccagggcattctggaag

SEQ ID NO: 31505 - DNA, 25 bp, synthetic construct
  misc_feature 1..25: note = Oligonucleotide
  source 1..25: mol_type = other DNA
ccctcacctgcccagggcattctgg

SEQ ID NO: 31506 - DNA, 25 bp, synthetic construct
  misc_feature 1..25: note = Oligonucleotide
  source 1..25: mol_type = other DNA
gatccctcacctgcccagggcattc

SEQ ID NO: 31507 - DNA, 25 bp, synthetic construct
  misc_feature 1..25: note = Oligonucleotide
  source 1..25: mol_type = other DNA
ggtgatccctcacctgcccagggca

SEQ ID NO: 31508 - DNA, 25 bp, synthetic construct
  misc_feature 1..25: note = Oligonucleotide
  source 1..25: mol_type = other DNA
ccaggtgatccctcacctgcccagg

SEQ ID NO: 31509 - DNA, 25 bp, synthetic construct
  misc_feature 1..25: note = Oligonucleotide
  source 1..25: mol_type = other DNA
ctgccaggtgatccctcacctgccc

SEQ ID NO: 31510 - DNA, 25 bp, synthetic construct
  misc_feature 1..25: note = Oligonucleotide
  source 1..25: mol_type = other DNA
actctgccaggtgatccctcacctg

SEQ ID NO: 31511 - DNA, 25 bp, synthetic construct
  misc_feature 1..25: note = Oligonucleotide
  source 1..25: mol_type = other DNA
cagactctgccaggtgatccctcac

SEQ ID NO: 31512 - DNA, 25 bp, synthetic construct
  misc_feature 1..25: note = Oligonucleotide
  source 1..25: mol_type = other DNA
tgccagactctgccaggtgatccct

SEQ ID NO: 31513 - DNA, 25 bp, synthetic construct
  misc_feature 1..25: note = Oligonucleotide
  source 1..25: mol_type = other DNA
agttgccagactctgccaggtgatc

SEQ ID NO: 31514 - DNA, 25 bp, synthetic construct
  misc_feature 1..25: note = Oligonucleotide
  source 1..25: mol_type = other DNA
ggcagttgccagactctgccaggtg

SEQ ID NO: 31515 - DNA, 25 bp, synthetic construct
  misc_feature 1..25: note = Oligonucleotide
  source 1..25: mol_type = other DNA
accggcagttgccagactctgccag

SEQ ID NO: 31516 - DNA, 25 bp, synthetic construct
  misc_feature 1..25: note = Oligonucleotide
  source 1..25: mol_type = other DNA
tttaccggcagttgccagactctgc

SEQ ID NO: 31517 - DNA, 25 bp, synthetic construct
  misc_feature 1..25: note = Oligonucleotide
  source 1..25: mol_type = other DNA
gcttttaccggcagttgccagactc

SEQ ID NO: 31518 - DNA, 25 bp, synthetic construct
  misc_feature 1..25: note = Oligonucleotide
  source 1..25: mol_type = other DNA
ggtgcttttaccggcagttgccaga

SEQ ID NO: 31519 - DNA, 25 bp, synthetic construct
  misc_feature 1..25: note = Oligonucleotide
  source 1..25: mol_type = other DNA
gcaggtgcttttaccggcagttgcc

SEQ ID NO: 31520 - DNA, 25 bp, synthetic construct
  misc_feature 1..25: note = Oligonucleotide
  source 1..25: mol_type = other DNA
agggcaggtgcttttaccggcagtt

SEQ ID NO: 31521 - DNA, 25 bp, synthetic construct
  misc_feature 1..25: note = Oligonucleotide
  source 1..25: mol_type = other DNA
gggagggcaggtgcttttaccggca

SEQ ID NO: 31522 - DNA, 25 bp, synthetic construct
  misc_feature 1..25: note = Oligonucleotide
  source 1..25: mol_type = other DNA
acagggagggcaggtgcttttaccg

SEQ ID NO: 31523 - DNA, 25 bp, synthetic construct
  misc_feature 1..25: note = Oligonucleotide
  source 1..25: mol_type = other DNA
ggcacagggagggcaggtgctttta

SEQ ID NO: 31524 - DNA, 25 bp, synthetic construct
  misc_feature 1..25: note = Oligonucleotide
  source 1..25: mol_type = other DNA
caaggcacagggagggcaggtgctt

SEQ ID NO: 31525 - DNA, 25 bp, synthetic construct
  misc_feature 1..25: note = Oligonucleotide
  source 1..25: mol_type = other DNA
cttcaaggcacagggagggcaggtg

SEQ ID NO: 31526 - DNA, 25 bp, synthetic construct
  misc_feature 1..25: note = Oligonucleotide
  source 1..25: mol_type = other DNA
tgccttcaaggcacagggagggcag

SEQ ID NO: 31527 - DNA, 25 bp, synthetic construct
  misc_feature 1..25: note = Oligonucleotide
  source 1..25: mol_type = other DNA
gcctgccttcaaggcacagggaggg

SEQ ID NO: 31528 - DNA, 25 bp, synthetic construct
  misc_feature 1..25: note = Oligonucleotide
  source 1..25: mol_type = other DNA
ggtgcctgccttcaaggcacaggga

SEQ ID NO: 31529 - DNA, 25 bp, synthetic construct
  misc_feature 1..25: note = Oligonucleotide
  source 1..25: mol_type = other DNA
gacggtgcctgccttcaaggcacag

SEQ ID NO: 31530 - DNA, 25 bp, synthetic construct
  misc_feature 1..25: note = Oligonucleotide
  source 1..25: mol_type = other DNA
aaagacggtgcctgccttcaaggca

SEQ ID NO: 31531 - DNA, 25 bp, synthetic construct
  misc_feature 1..25: note = Oligonucleotide
  source 1..25: mol_type = other DNA
gacaaagacggtgcctgccttcaag

SEQ ID NO: 31532 - DNA, 25 bp, synthetic construct
  misc_feature 1..25: note = Oligonucleotide
  source 1..25: mol_type = other DNA
aacgacaaagacggtgcctgccttc

SEQ ID NO: 31533 - DNA, 25 bp, synthetic construct
  misc_feature 1..25: note = Oligonucleotide
  source 1..25: mol_type = other DNA
ggaaacgacaaagacggtgcctgcc

SEQ ID NO: 31534 - DNA, 25 bp, synthetic construct
  misc_feature 1..25: note = Oligonucleotide
  source 1..25: mol_type = other DNA
ctaggaaacgacaaagacggtgcct

SEQ ID NO: 31535 - DNA, 25 bp, synthetic construct
  misc_feature 1..25: note = Oligonucleotide
  source 1..25: mol_type = other DNA
aaactaggaaacgacaaagacggtg

SEQ ID NO: 31536 - DNA, 25 bp, synthetic construct
  misc_feature 1..25: note = Oligonucleotide
  source 1..25: mol_type = other DNA
atgaaactaggaaacgacaaagacg

SEQ ID NO: 31537 - DNA, 25 bp, synthetic construct
  misc_feature 1..25: note = Oligonucleotide
  source 1..25: mol_type = other DNA
ctgatgaaactaggaaacgacaaag

SEQ ID NO: 31538 - DNA, 25 bp, synthetic construct
  misc_feature 1..25: note = Oligonucleotide
  source 1..25: mol_type = other DNA
gctctgatgaaactaggaaacgaca

SEQ ID NO: 31539 - DNA, 25 bp, synthetic construct
  misc_feature 1..25: note = Oligonucleotide
  source 1..25: mol_type = other DNA
ctggctctgatgaaactaggaaacg

SEQ ID NO: 31540 - DNA, 25 bp, synthetic construct
  misc_feature 1..25: note = Oligonucleotide
  source 1..25: mol_type = other DNA
tgcctggctctgatgaaactaggaa

SEQ ID NO: 31541 - DNA, 25 bp, synthetic construct
  misc_feature 1..25: note = Oligonucleotide
  source 1..25: mol_type = other DNA
cagtgcctggctctgatgaaactag

SEQ ID NO: 31542 - DNA, 25 bp, synthetic construct
  misc_feature 1..25: note = Oligonucleotide
  source 1..25: mol_type = other DNA
cctcagtgcctggctctgatgaaac

SEQ ID NO: 31543 - DNA, 25 bp, synthetic construct
  misc_feature 1..25: note = Oligonucleotide
  source 1..25: mol_type = other DNA
cctcctcagtgcctggctctgatga

SEQ ID NO: 31544 - DNA, 25 bp, synthetic construct
  misc_feature 1..25: note = Oligonucleotide
  source 1..25: mol_type = other DNA
caccctcctcagtgcctggctctga

SEQ ID NO: 31545 - DNA, 25 bp, synthetic construct
  misc_feature 1..25: note = Oligonucleotide
  source 1..25: mol_type = other DNA
aaacaccctcctcagtgcctggctc

SEQ ID NO: 31546 - DNA, 25 bp, synthetic construct
  misc_feature 1..25: note = Oligonucleotide
  source 1..25: mol_type = other DNA
gccaaacaccctcctcagtgcctgg

SEQ ID NO: 31547 - DNA, 25 bp, synthetic construct
  misc_feature 1..25: note = Oligonucleotide
  source 1..25: mol_type = other DNA
tctgccaaacaccctcctcagtgcc

SEQ ID NO: 31548 - DNA, 25 bp, synthetic construct
  misc_feature 1..25: note = Oligonucleotide
  source 1..25: mol_type = other DNA
atgtctgccaaacaccctcctcagt

SEQ ID NO: 31549 - DNA, 25 bp, synthetic construct
  misc_feature 1..25: note = Oligonucleotide
  source 1..25: mol_type = other DNA
acaatgtctgccaaacaccctcctc

SEQ ID NO: 31550 - DNA, 25 bp, synthetic construct
  misc_feature 1..25: note = Oligonucleotide
  source 1..25: mol_type = other DNA
tcaacaatgtctgccaaacaccctc

SEQ ID NO: 31551 - DNA, 25 bp, synthetic construct
  misc_feature 1..25: note = Oligonucleotide
  source 1..25: mol_type = other DNA
cactcaacaatgtctgccaaacacc

SEQ ID NO: 31552 - DNA, 25 bp, synthetic construct
  misc_feature 1..25: note = Oligonucleotide
  source 1..25: mol_type = other DNA
ttccactcaacaatgtctgccaaac

SEQ ID NO: 31553 - DNA, 25 bp, synthetic construct
  misc_feature 1..25: note = Oligonucleotide
  source 1..25: mol_type = other DNA
ctcttccactcaacaatgtctgcca

SEQ ID NO: 31554 - DNA, 25 bp, synthetic construct
  misc_feature 1..25: note = Oligonucleotide
  source 1..25: mol_type = other DNA
taactcttccactcaacaatgtctg

SEQ ID NO: 31555 - DNA, 25 bp, synthetic construct
  misc_feature 1..25: note = Oligonucleotide
  source 1..25: mol_type = other DNA
atgtaactcttccactcaacaatgt

SEQ ID NO: 31556 - DNA, 25 bp, synthetic construct
  misc_feature 1..25: note = Oligonucleotide
  source 1..25: mol_type = other DNA
tttatgtaactcttccactcaacaa

SEQ ID NO: 31557 - DNA, 25 bp, synthetic construct
  misc_feature 1..25: note = Oligonucleotide
  source 1..25: mol_type = other DNA
ctgtttatgtaactcttccactcaa

SEQ ID NO: 31558 - DNA, 25 bp, synthetic construct
  misc_feature 1..25: note = Oligonucleotide
  source 1..25: mol_type = other DNA
atactgtttatgtaactcttccact

SEQ ID NO: 31559 - DNA, 25 bp, synthetic construct
  misc_feature 1..25: note = Oligonucleotide
  source 1..25: mol_type = other DNA
aacatactgtttatgtaactcttcc

SEQ ID NO: 31560 - DNA, 25 bp, synthetic construct
  misc_feature 1..25: note = Oligonucleotide
  source 1..25: mol_type = other DNA
aacaacatactgtttatgtaactct

SEQ ID NO: 31561 - DNA, 25 bp, synthetic construct
  misc_feature 1..25: note = Oligonucleotide
  source 1..25: mol_type = other DNA
gacaacaacatactgtttatgtaac

SEQ ID NO: 31562 - DNA, 25 bp, synthetic construct
  misc_feature 1..25: note = Oligonucleotide
  source 1..25: mol_type = other DNA
cctgacaacaacatactgtttatgt

SEQ ID NO: 31563 - DNA, 25 bp, synthetic construct
  misc_feature 1..25: note = Oligonucleotide
  source 1..25: mol_type = other DNA
catcctgacaacaacatactgttta

SEQ ID NO: 31564 - DNA, 25 bp, synthetic construct
  misc_feature 1..25: note = Oligonucleotide
  source 1..25: mol_type = other DNA
ggccatcctgacaacaacatactgt

SEQ ID NO: 31565 - DNA, 25 bp, synthetic construct
  misc_feature 1..25: note = Oligonucleotide
  source 1..25: mol_type = other DNA
ggcggccatcctgacaacaacatac

SEQ ID NO: 31566 - DNA, 25 bp, synthetic construct
  misc_feature 1..25: note = Oligonucleotide
  source 1..25: mol_type = other DNA
gccggcggccatcctgacaacaaca

SEQ ID NO: 31567 - DNA, 25 bp, synthetic construct
  misc_feature 1..25: note = Oligonucleotide
  source 1..25: mol_type = other DNA
aaggccggcggccatcctgacaaca

SEQ ID NO: 31568 - DNA, 25 bp, synthetic construct
  misc_feature 1..25: note = Oligonucleotide
  source 1..25: mol_type = other DNA
gtaaaggccggcggccatcctgaca

SEQ ID NO: 31569 - DNA, 25 bp, synthetic construct
  misc_feature 1..25: note = Oligonucleotide
  source 1..25: mol_type = other DNA
actgtaaaggccggcggccatcctg

SEQ ID NO: 31570 - DNA, 25 bp, synthetic construct
  misc_feature 1..25: note = Oligonucleotide
  source 1..25: mol_type = other DNA
agaactgtaaaggccggcggccatc

SEQ ID NO: 31571 - DNA, 25 bp, synthetic construct
  misc_feature 1..25: note = Oligonucleotide
  source 1..25: mol_type = other DNA
gacagaactgtaaaggccggcggcc

SEQ ID NO: 31572 - DNA, 25 bp, synthetic construct
  misc_feature 1..25: note = Oligonucleotide
  source 1..25: mol_type = other DNA
actgacagaactgtaaaggccggcg

SEQ ID NO: 31573 - DNA, 25 bp, synthetic construct
  misc_feature 1..25: note = Oligonucleotide
  source 1..25: mol_type = other DNA
tggactgacagaactgtaaaggccg

SEQ ID NO: 31574 - DNA, 25 bp, synthetic construct
  misc_feature 1..25: note = Oligonucleotide
  source 1..25: mol_type = other DNA
gcctggactgacagaactgtaaagg

SEQ ID NO: 31575 - DNA, 25 bp, synthetic construct
  misc_feature 1..25: note = Oligonucleotide
  source 1..25: mol_type = other DNA
cgggcctggactgacagaactgtaa

SEQ ID NO: 31576 - DNA, 25 bp, synthetic construct
  misc_feature 1..25: note = Oligonucleotide
  source 1..25: mol_type = other DNA
cagcgggcctggactgacagaactg

SEQ ID NO: 31577 - DNA, 25 bp, synthetic construct
  misc_feature 1..25: note = Oligonucleotide
  source 1..25: mol_type = other DNA
caacagcgggcctggactgacagaa

SEQ ID NO: 31578 - DNA, 25 bp, synthetic construct
  misc_feature 1..25: note = Oligonucleotide
  source 1..25: mol_type = other DNA
gcccaacagcgggcctggactgaca

SEQ ID NO: 31579 - DNA, 25 bp, synthetic construct
  misc_feature 1..25: note = Oligonucleotide
  source 1..25: mol_type = other DNA
tcagcccaacagcgggcctggactg

SEQ ID NO: 31580 - DNA, 25 bp, synthetic construct
  misc_feature 1..25: note = Oligonucleotide
  source 1..25: mol_type = other DNA
cattcagcccaacagcgggcctgga

SEQ ID NO: 31581 - DNA, 25 bp, synthetic construct
  misc_feature 1..25: note = Oligonucleotide
  source 1..25: mol_type = other DNA
tgccattcagcccaacagcgggcct

SEQ ID NO: 31582 - DNA, 25 bp, synthetic construct
  misc_feature 1..25: note = Oligonucleotide
  source 1..25: mol_type = other DNA
acatgccattcagcccaacagcggg

SEQ ID NO: 31583 - DNA, 25 bp, synthetic construct
  misc_feature 1..25: note = Oligonucleotide
  source 1..25: mol_type = other DNA
tacacatgccattcagcccaacagc

SEQ ID NO: 31584 - DNA, 25 bp, synthetic construct
  misc_feature 1..25: note = Oligonucleotide
  source 1..25: mol_type = other DNA
gtatacacatgccattcagcccaac

SEQ ID NO: 31585 - DNA, 25 bp, synthetic construct
  misc_feature 1..25: note = Oligonucleotide
  source 1..25: mol_type = other DNA
ctagtatacacatgccattcagccc

SEQ ID NO: 31586 - DNA, 25 bp, synthetic construct
  misc_feature 1..25: note = Oligonucleotide
  source 1..25: mol_type = other DNA
gagctagtatacacatgccattcag

SEQ ID NO: 31587 - DNA, 25 bp, synthetic construct
  misc_feature 1..25: note = Oligonucleotide
  source 1..25: mol_type = other DNA
aaggagctagtatacacatgccatt

SEQ ID NO: 31588 - DNA, 25 bp, synthetic construct
  misc_feature 1..25: note = Oligonucleotide
  source 1..25: mol_type = other DNA
ttaaaggagctagtatacacatgcc

SEQ ID NO: 31589 - DNA, 25 bp, synthetic construct
  misc_feature 1..25: note = Oligonucleotide
  source 1..25: mol_type = other DNA
aggttaaaggagctagtatacacat

SEQ ID NO: 31590 - DNA, 25 bp, synthetic construct
  misc_feature 1..25: note = Oligonucleotide
  source 1..25: mol_type = other DNA
tcaaggttaaaggagctagtataca

SEQ ID NO: 31591 - DNA, 25 bp, synthetic construct
  misc_feature 1..25: note = Oligonucleotide
  source 1..25: mol_type = other DNA
tcgtcaaggttaaaggagctagtat

SEQ ID NO: 31592 - DNA, 25 bp, synthetic construct
  misc_feature 1..25: note = Oligonucleotide
  source 1..25: mol_type = other DNA
cgttcgtcaaggttaaaggagctag

SEQ ID NO: 31593 - DNA, 25 bp, synthetic construct
  misc_feature 1..25: note = Oligonucleotide
  source 1..25: mol_type = other DNA
gtacgttcgtcaaggttaaaggagc

SEQ ID NO: 31594 - DNA, 25 bp, synthetic construct
  misc_feature 1..25: note = Oligonucleotide
  source 1..25: mol_type = other DNA
catgtacgttcgtcaaggttaaagg

SEQ ID NO: 31595 - DNA, 25 bp, synthetic construct
  misc_feature 1..25: note = Oligonucleotide
  source 1..25: mol_type = other DNA
gaacatgtacgttcgtcaaggttaa

SEQ ID NO: 31596 - DNA, 25 bp, synthetic construct
  misc_feature 1..25: note = Oligonucleotide
  source 1..25: mol_type = other DNA
catgaacatgtacgttcgtcaaggt

SEQ ID NO: 31597 - DNA, 25 bp, synthetic construct
  misc_feature 1..25: note = Oligonucleotide
  source 1..25: mol_type = other DNA
gagcatgaacatgtacgttcgtcaa

SEQ ID NO: 31598 - DNA, 25 bp, synthetic construct
  misc_feature 1..25: note = Oligonucleotide
  source 1..25: mol_type = other DNA
atagagcatgaacatgtacgttcgt

SEQ ID NO: 31599 - DNA, 25 bp, synthetic construct
  misc_feature 1..25: note = Oligonucleotide
  source 1..25: mol_type = other DNA
ttaatagagcatgaacatgtacgtt

SEQ ID NO: 31600 - DNA, 25 bp, synthetic construct
  misc_feature 1..25: note = Oligonucleotide
  source 1..25: mol_type = other DNA
gtattaatagagcatgaacatgtac

SEQ ID NO: 31601 - DNA, 25 bp, synthetic construct
  misc_feature 1..25: note = Oligonucleotide
  source 1..25: mol_type = other DNA
atggtattaatagagcatgaacatg

SEQ ID NO: 31602 - DNA, 25 bp, synthetic construct
  misc_feature 1..25: note = Oligonucleotide
  source 1..25: mol_type = other DNA
aacatggtattaatagagcatgaac

SEQ ID NO: 31603 - DNA, 25 bp, synthetic construct
  misc_feature 1..25: note = Oligonucleotide
  source 1..25: mol_type = other DNA
tgtaacatggtattaatagagcatg

SEQ ID NO: 31604 - DNA, 25 bp, synthetic construct
  misc_feature 1..25: note = Oligonucleotide
  source 1..25: mol_type = other DNA
atctgtaacatggtattaatagagc

SEQ ID NO: 31605 - DNA, 25 bp, synthetic construct
  misc_feature 1..25: note = Oligonucleotide
  source 1..25: mol_type = other DNA
ctcatctgtaacatggtattaatag

SEQ ID NO: 31606 - DNA, 25 bp, synthetic construct
  misc_feature 1..25: note = Oligonucleotide
  source 1..25: mol_type = other DNA
acgctcatctgtaacatggtattaa

SEQ ID NO: 31607 - DNA, 25 bp, synthetic construct
  misc_feature 1..25: note = Oligonucleotide
  source 1..25: mol_type = other DNA
aggacgctcatctgtaacatggtat

SEQ ID NO: 31608 - DNA, 25 bp, synthetic construct
  misc_feature 1..25: note = Oligonucleotide
  source 1..25: mol_type = other DNA
accaggacgctcatctgtaacatgg

SEQ ID NO: 31609 - DNA, 25 bp, synthetic construct
  misc_feature 1..25: note = Oligonucleotide
  source 1..25: mol_type = other DNA
cgtaccaggacgctcatctgtaaca

SEQ ID NO: 31610 - DNA, 25 bp, synthetic construct
  misc_feature 1..25: note = Oligonucleotide
  source 1..25: mol_type = other DNA
ctgcgtaccaggacgctcatctgta

SEQ ID NO: 31611 - DNA, 25 bp, synthetic construct
  misc_feature 1..25: note = Oligonucleotide
  source 1..25: mol_type = other DNA
cacctgcgtaccaggacgctcatct

SEQ ID NO: 31612 - DNA, 25 bp, synthetic construct
  misc_feature 1..25: note = Oligonucleotide
  source 1..25: mol_type = other DNA
ccccacctgcgtaccaggacgctca

SEQ ID NO: 31613 - DNA, 25 bp, synthetic construct
  misc_feature 1..25: note = Oligonucleotide
  source 1..25: mol_type = other DNA
aggccccacctgcgtaccaggacgc

SEQ ID NO: 31614 - DNA, 25 bp, synthetic construct
  misc_feature 1..25: note = Oligonucleotide
  source 1..25: mol_type = other DNA
cacaggccccacctgcgtaccagga

SEQ ID NO: 31615 - DNA, 25 bp, synthetic construct
  misc_feature 1..25: note = Oligonucleotide
  source 1..25: mol_type = other DNA
cgtcacaggccccacctgcgtacca

SEQ ID NO: 31616 - DNA, 25 bp, synthetic construct
  misc_feature 1..25: note = Oligonucleotide
  source 1..25: mol_type = other DNA
acccgtcacaggccccacctgcgta

SEQ ID NO: 31617 - DNA, 25 bp, synthetic construct
  misc_feature 1..25: note = Oligonucleotide
  source 1..25: mol_type = other DNA
tggacccgtcacaggccccacctgc

SEQ ID NO: 31618 - DNA, 25 bp, synthetic construct
  misc_feature 1..25: note = Oligonucleotide
  source 1..25: mol_type = other DNA
ctctggacccgtcacaggccccacc

SEQ ID NO: 31619 - DNA, 25 bp, synthetic construct
  misc_feature 1..25: note = Oligonucleotide
  source 1..25: mol_type = other DNA
tgactctggacccgtcacaggcccc

SEQ ID NO: 31620 - DNA, 25 bp, synthetic construct
  misc_feature 1..25: note = Oligonucleotide
  source 1..25: mol_type = other DNA
ctgtgactctggacccgtcacaggc

SEQ ID NO: 31621 - DNA, 25 bp, synthetic construct
  misc_feature 1..25: note = Oligonucleotide
  source 1..25: mol_type = other DNA
gctctgtgactctggacccgtcaca

SEQ ID NO: 31622 - DNA, 25 bp, synthetic construct
  misc_feature 1..25: note = Oligonucleotide
  source 1..25: mol_type = other DNA
gtagctctgtgactctggacccgtc

SEQ ID NO: 31623 - DNA, 25 bp, synthetic construct
  misc_feature 1..25: note = Oligonucleotide
  source 1..25: mol_type = other DNA
tccgtagctctgtgactctggaccc

SEQ ID NO: 31624 - DNA, 25 bp, synthetic construct
  misc_feature 1..25: note = Oligonucleotide
  source 1..25: mol_type = other DNA
tgatccgtagctctgtgactctgga

SEQ ID NO: 31625 - DNA, 25 bp, synthetic construct
  misc_feature 1..25: note = Oligonucleotide
  source 1..25: mol_type = other DNA
agctgatccgtagctctgtgactct

SEQ ID NO: 31626 - DNA, 25 bp, synthetic construct
  misc_feature 1..25: note = Oligonucleotide
  source 1..25: mol_type = other DNA
tgaagctgatccgtagctctgtgac

SEQ ID NO: 31627 - DNA, 25 bp, synthetic construct
  misc_feature 1..25: note = Oligonucleotide
  source 1..25: mol_type = other DNA
cagtgaagctgatccgtagctctgt

SEQ ID NO: 31628 - DNA, 25 bp, synthetic construct
  misc_feature 1..25: note = Oligonucleotide
  source 1..25: mol_type = other DNA
gcccagtgaagctgatccgtagctc

SEQ ID NO: 31629 - DNA, 25 bp, synthetic construct
  misc_feature 1..25: note = Oligonucleotide
  source 1..25: mol_type = other DNA
ggggcccagtgaagctgatccgtag

SEQ ID NO: 31630 - DNA, 25 bp, synthetic construct
  misc_feature 1..25: note = Oligonucleotide
  source 1..25: mol_type = other DNA
cctggggcccagtgaagctgatccg

SEQ ID NO: 31631 - DNA, 25 bp, synthetic construct
  misc_feature 1..25: note = Oligonucleotide
  source 1..25: mol_type = other DNA
ctacctggggcccagtgaagctgat

SEQ ID NO: 31632 - DNA, 25 bp, synthetic construct
  misc_feature 1..25: note = Oligonucleotide
  source 1..25: mol_type = other DNA
ggtctacctggggcccagtgaagct

SEQ ID NO: 31633 - DNA, 25 bp, synthetic construct
  misc_feature 1..25: note = Oligonucleotide
  source 1..25: mol_type = other DNA
ttgggtctacctggggcccagtgaa

SEQ ID NO: 31634 - DNA, 25 bp, synthetic construct
  misc_feature 1..25: note = Oligonucleotide
  source 1..25: mol_type = other DNA
ggattgggtctacctggggcccagt

SEQ ID NO: 31635 - DNA, 25 bp, synthetic construct
  misc_feature 1..25: note = Oligonucleotide
  source 1..25: mol_type = other DNA
tggggattgggtctacctggggccc

SEQ ID NO: 31636 - DNA, 25 bp, synthetic construct
  misc_feature 1..25: note = Oligonucleotide
  source 1..25: mol_type = other DNA
agttggggattgggtctacctgggg

SEQ ID NO: 31637 - DNA, 25 bp, synthetic construct
  misc_feature 1..25: note = Oligonucleotide
  source 1..25: mol_type = other DNA
gaaagttggggattgggtctacctg

SEQ ID NO: 31638 - DNA, 25 bp, synthetic construct
  misc_feature 1..25: note = Oligonucleotide
  source 1..25: mol_type = other DNA
ttagaaagttggggattgggtctac

SEQ ID NO: 31639 - DNA, 25 bp, synthetic construct
  misc_feature 1..25: note = Oligonucleotide
  source 1..25: mol_type = other DNA
ggcttagaaagttggggattgggtc

SEQ ID NO: 31640 - DNA, 25 bp, synthetic construct
  misc_feature 1..25: note = Oligonucleotide
  source 1..25: mol_type = other DNA
tcaggcttagaaagttggggattgg

SEQ ID NO: 31641 - DNA, 25 bp, synthetic construct
  misc_feature 1..25: note = Oligonucleotide
  source 1..25: mol_type = other DNA
cactcaggcttagaaagttggggat

SEQ ID NO: 31642 - DNA, 25 bp, synthetic construct
  misc_feature 1..25: note = Oligonucleotide
  source 1..25: mol_type = other DNA
gaacactcaggcttagaaagttggg

SEQ ID NO: 31643 - DNA, 25 bp, synthetic construct
  misc_feature 1..25: note = Oligonucleotide
  source 1..25: mol_type = other DNA
gctgaacactcaggcttagaaagtt

SEQ ID NO: 31644 - DNA, 25 bp, synthetic construct
  misc_feature 1..25: note = Oligonucleotide
  source 1..25: mol_type = other DNA
tctgctgaacactcaggcttagaaa

SEQ ID NO: 31645 - DNA, 25 bp, synthetic construct
  misc_feature 1..25: note = Oligonucleotide
  source 1..25: mol_type = other DNA
ccctctgctgaacactcaggcttag

SEQ ID NO: 31646 - DNA, 25 bp, synthetic construct
  misc_feature 1..25: note = Oligonucleotide
  source 1..25: mol_type = other DNA
gagccctctgctgaacactcaggct

SEQ ID NO: 31647 - DNA, 25 bp, synthetic construct
  misc_feature 1..25: note = Oligonucleotide
  source 1..25: mol_type = other DNA
cctgagccctctgctgaacactcag

SEQ ID NO: 31648 - DNA, 25 bp, synthetic construct
  misc_feature 1..25: note = Oligonucleotide
  source 1..25: mol_type = other DNA
caccctgagccctctgctgaacact

SEQ ID NO: 31649 - DNA, 25 bp, synthetic construct
  misc_feature 1..25: note = Oligonucleotide
  source 1..25: mol_type = other DNA
ctgcaccctgagccctctgctgaac

SEQ ID NO: 31650 - DNA, 25 bp, synthetic construct
  misc_feature 1..25: note = Oligonucleotide
  source 1..25: mol_type = other DNA
ctgctgcaccctgagccctctgctg

SEQ ID NO: 31651 - DNA, 25 bp, synthetic construct
  misc_feature 1..25: note = Oligonucleotide
  source 1..25: mol_type = other DNA
gccctgctgcaccctgagccctctg

SEQ ID NO: 31652 - DNA, 25 bp, synthetic construct
  misc_feature 1..25: note = Oligonucleotide
  source 1..25: mol_type = other DNA
taggccctgctgcaccctgagccct

SEQ ID NO: 31653 - DNA, 25 bp, synthetic construct
  misc_feature 1..25: note = Oligonucleotide
  source 1..25: mol_type = other DNA
ccataggccctgctgcaccctgagc

SEQ ID NO: 31654 - DNA, 25 bp, synthetic construct
  misc_feature 1..25: note = Oligonucleotide
  source 1..25: mol_type = other DNA
cttccataggccctgctgcaccctg

SEQ ID NO: 31655 - DNA, 25 bp, synthetic construct
  misc_feature 1..25: note = Oligonucleotide
  source 1..25: mol_type = other DNA
cgccttccataggccctgctgcacc

SEQ ID NO: 31656 - DNA, 25 bp, synthetic construct
  misc_feature 1..25: note = Oligonucleotide
  source 1..25: mol_type = other DNA
gggcgccttccataggccctgctgc

SEQ ID NO: 31657 - DNA, 25 bp, synthetic construct
  misc_feature 1..25: note = Oligonucleotide
  source 1..25: mol_type = other DNA
aaggggcgccttccataggccctgc

SEQ ID NO: 31658 - DNA, 25 bp, synthetic construct
  misc_feature 1..25: note = Oligonucleotide
  source 1..25: mol_type = other DNA
aggaaggggcgccttccataggccc

SEQ ID NO: 31659 - DNA, 25 bp, synthetic construct
  misc_feature 1..25: note = Oligonucleotide
  source 1..25: mol_type = other DNA
cacaggaaggggcgccttccatagg

SEQ ID NO: 31660 - DNA, 25 bp, synthetic construct
  misc_feature 1..25: note = Oligonucleotide
  source 1..25: mol_type = other DNA
cagcacaggaaggggcgccttccat

SEQ ID NO: 31661 - DNA, 25 bp, synthetic construct
  misc_feature 1..25: note = Oligonucleotide
  source 1..25: mol_type = other DNA
cggcagcacaggaaggggcgccttc

SEQ ID NO: 31662 - DNA, 25 bp, synthetic construct
  misc_feature 1..25: note = Oligonucleotide
  source 1..25: mol_type = other DNA
gggcggcagcacaggaaggggcgcc

SEQ ID NO: 31663 - DNA, 25 bp, synthetic construct
  misc_feature 1..25: note = Oligonucleotide
  source 1..25: mol_type = other DNA
caggggcggcagcacaggaaggggc

SEQ ID NO: 31664 - DNA, 25 bp, synthetic construct
  misc_feature 1..25: note = Oligonucleotide
  source 1..25: mol_type = other DNA
gagcaggggcggcagcacaggaagg

SEQ ID NO: 31665 - DNA, 25 bp, synthetic construct
  misc_feature 1..25: note = Oligonucleotide
  source 1..25: mol_type = other DNA
gcagagcaggggcggcagcacagga

SEQ ID NO: 31666 - DNA, 25 bp, synthetic construct
  misc_feature 1..25: note = Oligonucleotide
  source 1..25: mol_type = other DNA
gctgcagagcaggggcggcagcaca

SEQ ID NO: 31667 - DNA, 25 bp, synthetic construct
  misc_feature 1..25: note = Oligonucleotide
  source 1..25: mol_type = other DNA
caggctgcagagcaggggcggcagc

SEQ ID NO: 31668 - DNA, 25 bp, synthetic construct
  misc_feature 1..25: note = Oligonucleotide
  source 1..25: mol_type = other DNA
gaccaggctgcagagcaggggcggc

SEQ ID NO: 31669 - DNA, 25 bp, synthetic construct
  misc_feature 1..25: note = Oligonucleotide
  source 1..25: mol_type = other DNA
tgagaccaggctgcagagcaggggc

SEQ ID NO: 31670 - DNA, 25 bp, synthetic construct
  misc_feature 1..25: note = Oligonucleotide
  source 1..25: mol_type = other DNA
cgctgagaccaggctgcagagcagg

SEQ ID NO: 31671 - DNA, 25 bp, synthetic construct
  misc_feature 1..25: note = Oligonucleotide
  source 1..25: mol_type = other DNA
catcgctgagaccaggctgcagagc

SEQ ID NO: 31672 - DNA, 25 bp, synthetic construct
  misc_feature 1..25: note = Oligonucleotide
  source 1..25: mol_type = other DNA
agacatcgctgagaccaggctgcag

SEQ ID NO: 31673 - DNA, 25 bp, synthetic construct
  misc_feature 1..25: note = Oligonucleotide
  source 1..25: mol_type = other DNA
cggagacatcgctgagaccaggctg

SEQ ID NO: 31674 - DNA, 25 bp, synthetic construct
  misc_feature 1..25: note = Oligonucleotide
  source 1..25: mol_type = other DNA
acacggagacatcgctgagaccagg

SEQ ID NO: 31675 - DNA, 25 bp, synthetic construct
  misc_feature 1..25: note = Oligonucleotide
  source 1..25: mol_type = other DNA
cagacacggagacatcgctgagacc

SEQ ID NO: 31676 - DNA, 25 bp, synthetic construct
  misc_feature 1..25: note = Oligonucleotide
  source 1..25: mol_type = other DNA
agacagacacggagacatcgctgag

SEQ ID NO: 31677 - DNA, 25 bp, synthetic construct
  misc_feature 1..25: note = Oligonucleotide
  source 1..25: mol_type = other DNA
caaagacagacacggagacatcgct

SEQ ID NO: 31678 - DNA, 25 bp, synthetic construct
  misc_feature 1..25: note = Oligonucleotide
  source 1..25: mol_type = other DNA
aggcaaagacagacacggagacatc

SEQ ID NO: 31679 - DNA, 25 bp, synthetic construct
  misc_feature 1..25: note = Oligonucleotide
  source 1..25: mol_type = other DNA
cccaggcaaagacagacacggagac

SEQ ID NO: 31680 - DNA, 25 bp, synthetic construct
  misc_feature 1..25: note = Oligonucleotide
  source 1..25: mol_type = other DNA
aagcccaggcaaagacagacacgga

SEQ ID NO: 31681 - DNA, 25 bp, synthetic construct
  misc_feature 1..25: note = Oligonucleotide
  source 1..25: mol_type = other DNA
aacaagcccaggcaaagacagacac

SEQ ID NO: 31682 - DNA, 25 bp, synthetic construct
  misc_feature 1..25: note = Oligonucleotide
  source 1..25: mol_type = other DNA
tccaacaagcccaggcaaagacaga

SEQ ID NO: 31683 - DNA, 25 bp, synthetic construct
  misc_feature 1..25: note = Oligonucleotide
  source 1..25: mol_type = other DNA
gagtccaacaagcccaggcaaagac

SEQ ID NO: 31684 - DNA, 25 bp, synthetic construct
  misc_feature 1..25: note = Oligonucleotide
  source 1..25: mol_type = other DNA
tgcgagtccaacaagcccaggcaaa

SEQ ID NO: 31685 - DNA, 25 bp, synthetic construct
  misc_feature 1..25: note = Oligonucleotide
  source 1..25: mol_type = other DNA
ccttgcgagtccaacaagcccaggc

SEQ ID NO: 31686 - DNA, 25 bp, synthetic construct
  misc_feature 1..25: note = Oligonucleotide
  source 1..25: mol_type = other DNA
cagccttgcgagtccaacaagccca

SEQ ID NO: 31687 - DNA, 25 bp, synthetic construct
  misc_feature 1..25: note = Oligonucleotide
  source 1..25: mol_type = other DNA
agccagccttgcgagtccaacaagc

SEQ ID NO: 31688 - DNA, 25 bp, synthetic construct
  misc_feature 1..25: note = Oligonucleotide
  source 1..25: mol_type = other DNA
tacagccagccttgcgagtccaaca

SEQ ID NO: 31689 - DNA, 25 bp, synthetic construct
  misc_feature 1..25: note = Oligonucleotide
  source 1..25: mol_type = other DNA
cagtacagccagccttgcgagtcca

SEQ ID NO: 31690 - DNA, 25 bp, synthetic construct
  misc_feature 1..25: note = Oligonucleotide
  source 1..25: mol_type = other DNA
gggcagtacagccagccttgcgagt

SEQ ID NO: 31691 - DNA, 25 bp, synthetic construct
  misc_feature 1..25: note = Oligonucleotide
  source 1..25: mol_type = other DNA
ttggggcagtacagccagccttgcg

SEQ ID NO: 31692 - DNA, 25 bp, synthetic construct
  misc_feature 1..25: note = Oligonucleotide
  source 1..25: mol_type = other DNA
gatttggggcagtacagccagcctt

SEQ ID NO: 31693 - DNA, 25 bp, synthetic construct
  misc_feature 1..25: note = Oligonucleotide
  source 1..25: mol_type = other DNA
tgagatttggggcagtacagccagc

SEQ ID NO: 31694 - DNA, 25 bp, synthetic construct
  misc_feature 1..25: note = Oligonucleotide
  source 1..25: mol_type = other DNA
aattgagatttggggcagtacagcc

SEQ ID NO: 31695 - DNA, 25 bp, synthetic construct
  misc_feature 1..25: note = Oligonucleotide
  source 1..25: mol_type = other DNA
gagaattgagatttggggcagtaca

SEQ ID NO: 31696 - DNA, 25 bp, synthetic construct
  misc_feature 1..25: note = Oligonucleotide
  source 1..25: mol_type = other DNA
ggggagaattgagatttggggcagt

SEQ ID NO: 31697 - DNA, 25 bp, synthetic construct
  misc_feature 1..25: note = Oligonucleotide
  source 1..25: mol_type = other DNA
tcaggggagaattgagatttggggc

SEQ ID NO: 31698 - DNA, 25 bp, synthetic construct
  misc_feature 1..25: note = Oligonucleotide
  source 1..25: mol_type = other DNA
gcttcaggggagaattgagatttgg

SEQ ID NO: 31699 - DNA, 25 bp, synthetic construct
  misc_feature 1..25: note = Oligonucleotide
  source 1..25: mol_type = other DNA
aaagcttcaggggagaattgagatt

SEQ ID NO: 31700 - DNA, 25 bp, synthetic construct
  misc_feature 1..25: note = Oligonucleotide
  source 1..25: mol_type = other DNA
aagaaagcttcaggggagaattgag

SEQ ID NO: 31701 - DNA, 25 bp, synthetic construct
  misc_feature 1..25: note = Oligonucleotide
  source 1..25: mol_type = other DNA
tataagaaagcttcaggggagaatt

SEQ ID NO: 31702 - DNA, 25 bp, synthetic construct
  misc_feature 1..25: note = Oligonucleotide
  source 1..25: mol_type = other DNA
gtctataagaaagcttcaggggaga

SEQ ID NO: 31703 - DNA, 25 bp, synthetic construct
  misc_feature 1..25: note = Oligonucleotide
  source 1..25: mol_type = other DNA
cgggtctataagaaagcttcagggg

SEQ ID NO: 31704 - DNA, 25 bp, synthetic construct
  misc_feature 1..25: note = Oligonucleotide
  source 1..25: mol_type = other DNA
ccgcgggtctataagaaagcttcag

SEQ ID NO: 31705 - DNA, 25 bp, synthetic construct
  misc_feature 1..25: note = Oligonucleotide
  source 1..25: mol_type = other DNA
aatccgcgggtctataagaaagctt

SEQ ID NO: 31706 - DNA, 25 bp, synthetic construct
  misc_feature 1..25: note = Oligonucleotide
  source 1..25: mol_type = other DNA
gaaaatccgcgggtctataagaaag

SEQ ID NO: 31707 - DNA, 25 bp, synthetic construct
  misc_feature 1..25: note = Oligonucleotide
  source 1..25: mol_type = other DNA
ttagaaaatccgcgggtctataaga

SEQ ID NO: 31708 - DNA, 25 bp, synthetic construct
  misc_feature 1..25: note = Oligonucleotide
  source 1..25: mol_type = other DNA
cccttagaaaatccgcgggtctata

SEQ ID NO: 31709 - DNA, 25 bp, synthetic construct
  misc_feature 1..25: note = Oligonucleotide
  source 1..25: mol_type = other DNA
cagcccttagaaaatccgcgggtct

SEQ ID NO: 31710 - DNA, 25 bp, synthetic construct
  misc_feature 1..25: note = Oligonucleotide
  source 1..25: mol_type = other DNA
gcccagcccttagaaaatccgcggg

SEQ ID NO: 31711 - DNA, 25 bp, synthetic construct
  misc_feature 1..25: note = Oligonucleotide
  source 1..25: mol_type = other DNA
gccgcccagcccttagaaaatccgc

SEQ ID NO: 31712 - DNA, 25 bp, synthetic construct
  misc_feature 1..25: note = Oligonucleotide
  source 1..25: mol_type = other DNA
tgggccgcccagcccttagaaaatc

SEQ ID NO: 31713 - DNA, 25 bp, synthetic construct
  misc_feature 1..25: note = Oligonucleotide
  source 1..25: mol_type = other DNA
cactgggccgcccagcccttagaaa

SEQ ID NO: 31714 - DNA, 25 bp, synthetic construct
  misc_feature 1..25: note = Oligonucleotide
  source 1..25: mol_type = other DNA
agccactgggccgcccagcccttag

SEQ ID NO: 31715 - DNA, 25 bp, synthetic construct
  misc_feature 1..25: note = Oligonucleotide
  source 1..25: mol_type = other DNA
ttcagccactgggccgcccagccct

SEQ ID NO: 31716 - DNA, 25 bp, synthetic construct
  misc_feature 1..25: note = Oligonucleotide
  source 1..25: mol_type = other DNA
tctttcagccactgggccgcccagc

SEQ ID NO: 31717 - DNA, 25 bp, synthetic construct
  misc_feature 1..25: note = Oligonucleotide
  source 1..25: mol_type = other DNA
tgttctttcagccactgggccgccc

SEQ ID NO: 31718 - DNA, 25 bp, synthetic construct
  misc_feature 1..25: note = Oligonucleotide
  source 1..25: mol_type = other DNA
atgtgttctttcagccactgggccg

SEQ ID NO: 31719 - DNA, 25 bp, synthetic construct
  misc_feature 1..25: note = Oligonucleotide
  source 1..25: mol_type = other DNA
agaatgtgttctttcagccactggg

SEQ ID NO: 31720 - DNA, 25 bp, synthetic construct
  misc_feature 1..25: note = Oligonucleotide
  source 1..25: mol_type = other DNA
tgcagaatgtgttctttcagccact

SEQ ID NO: 31721 - DNA, 25 bp, synthetic construct
  misc_feature 1..25: note = Oligonucleotide
  source 1..25: mol_type = other DNA
gaatgcagaatgtgttctttcagcc

SEQ ID NO: 31722 - DNA, 25 bp, synthetic construct
  misc_feature 1..25: note = Oligonucleotide
  source 1..25: mol_type = other DNA
ccggaatgcagaatgtgttctttca

SEQ ID NO: 31723 - DNA, 25 bp, synthetic construct
  misc_feature 1..25: note = Oligonucleotide
  source 1..25: mol_type = other DNA
catccggaatgcagaatgtgttctt

SEQ ID NO: 31724 - DNA, 25 bp, synthetic construct
  misc_feature 1..25: note = Oligonucleotide
  source 1..25: mol_type = other DNA
aaacatccggaatgcagaatgtgtt

SEQ ID NO: 31725 - DNA, 25 bp, synthetic construct
  misc_feature 1..25: note = Oligonucleotide
  source 1..25: mol_type = other DNA
tggaaacatccggaatgcagaatgt

SEQ ID NO: 31726 - DNA, 25 bp, synthetic construct
  misc_feature 1..25: note = Oligonucleotide
  source 1..25: mol_type = other DNA
ggatggaaacatccggaatgcagaa

SEQ ID NO: 31727 - DNA, 25 bp, synthetic construct
  misc_feature 1..25: note = Oligonucleotide
  source 1..25: mol_type = other DNA
gcgggatggaaacatccggaatgca

SEQ ID NO: 31728 - DNA, 25 bp, synthetic construct
  misc_feature 1..25: note = Oligonucleotide
  source 1..25: mol_type = other DNA
tctgcgggatggaaacatccggaat

SEQ ID NO: 31729 - DNA, 25 bp, synthetic construct
  misc_feature 1..25: note = Oligonucleotide
  source 1..25: mol_type = other DNA
ctttctgcgggatggaaacatccgg

SEQ ID NO: 31730 - DNA, 25 bp, synthetic construct
  misc_feature 1..25: note = Oligonucleotide
  source 1..25: mol_type = other DNA
agcctttctgcgggatggaaacatc

SEQ ID NO: 31731 - DNA, 25 bp, synthetic construct
  misc_feature 1..25: note = Oligonucleotide
  source 1..25: mol_type = other DNA
agcagcctttctgcgggatggaaac

SEQ ID NO: 31732 - DNA, 25 bp, synthetic construct
  misc_feature 1..25: note = Oligonucleotide
  source 1..25: mol_type = other DNA
aggagcagcctttctgcgggatgga

SEQ ID NO: 31733 - DNA, 25 bp, synthetic construct
  misc_feature 1..25: note = Oligonucleotide
  source 1..25: mol_type = other DNA
ctcaggagcagcctttctgcgggat

SEQ ID NO: 31734 - DNA, 25 bp, synthetic construct
  misc_feature 1..25: note = Oligonucleotide
  source 1..25: mol_type = other DNA
caactcaggagcagcctttctgcgg

SEQ ID NO: 31735 - DNA, 25 bp, synthetic construct
  misc_feature 1..25: note = Oligonucleotide
  source 1..25: mol_type = other DNA
ctccaactcaggagcagcctttctg

SEQ ID NO: 31736 - DNA, 25 bp, synthetic construct
  misc_feature 1..25: note = Oligonucleotide
  source 1..25: mol_type = other DNA
tgcctccaactcaggagcagccttt

SEQ ID NO: 31737 - DNA, 25 bp, synthetic construct
  misc_feature 1..25: note = Oligonucleotide
  source 1..25: mol_type = other DNA
gcgtgcctccaactcaggagcagcc

SEQ ID NO: 31738 - DNA, 25 bp, synthetic construct
  misc_feature 1..25: note = Oligonucleotide
  source 1..25: mol_type = other DNA
aacgcgtgcctccaactcaggagca

SEQ ID NO: 31739 - DNA, 25 bp, synthetic construct
  misc_feature 1..25: note = Oligonucleotide
  source 1..25: mol_type = other DNA
ggcaacgcgtgcctccaactcagga

SEQ ID NO: 31740 - DNA, 25 bp, synthetic construct
  misc_feature 1..25: note = Oligonucleotide
  source 1..25: mol_type = other DNA
tgtggcaacgcgtgcctccaactca

SEQ ID NO: 31741 - DNA, 25 bp, synthetic construct
  misc_feature 1..25: note = Oligonucleotide
  source 1..25: mol_type = other DNA
gcctgtggcaacgcgtgcctccaac

SEQ ID NO: 31742 - DNA, 25 bp, synthetic construct
  misc_feature 1..25: note = Oligonucleotide
  source 1..25: mol_type = other DNA
ggagcctgtggcaacgcgtgcctcc

SEQ ID NO: 31743 - DNA, 25 bp, synthetic construct
  misc_feature 1..25: note = Oligonucleotide
  source 1..25: mol_type = other DNA
ggaggagcctgtggcaacgcgtgcc

SEQ ID NO: 31744 - DNA, 25 bp, synthetic construct
  misc_feature 1..25: note = Oligonucleotide
  source 1..25: mol_type = other DNA
cagggaggagcctgtggcaacgcgt

SEQ ID NO: 31745 - DNA, 25 bp, synthetic construct
  misc_feature 1..25: note = Oligonucleotide
  source 1..25: mol_type = other DNA
atgcagggaggagcctgtggcaacg

SEQ ID NO: 31746 - DNA, 25 bp, synthetic construct
  misc_feature 1..25: note = Oligonucleotide
  source 1..25: mol_type = other DNA
tgaatgcagggaggagcctgtggca

SEQ ID NO: 31747 - DNA, 25 bp, synthetic construct
  misc_feature 1..25: note = Oligonucleotide
  source 1..25: mol_type = other DNA
aaatgaatgcagggaggagcctgtg

SEQ ID NO: 31748 - DNA, 25 bp, synthetic construct
  misc_feature 1..25: note = Oligonucleotide
  source 1..25: mol_type = other DNA
aaaaaatgaatgcagggaggagcct

SEQ ID NO: 31749 - DNA, 25 bp, synthetic construct
  misc_feature 1..25: note = Oligonucleotide
  source 1..25: mol_type = other DNA
tacaaaaaatgaatgcagggaggag

SEQ ID NO: 31750 - DNA, 25 bp, synthetic construct
  misc_feature 1..25: note = Oligonucleotide
  source 1..25: mol_type = other DNA
acgtacaaaaaatgaatgcagggag

SEQ ID NO: 31751 - DNA, 25 bp, synthetic construct
  misc_feature 1..25: note = Oligonucleotide
  source 1..25: mol_type = other DNA
aacacgtacaaaaaatgaatgcagg

SEQ ID NO: 31752 - DNA, 25 bp, synthetic construct
  misc_feature 1..25: note = Oligonucleotide
  source 1..25: mol_type = other DNA
atgaacacgtacaaaaaatgaatgc

SEQ ID NO: 31753 - DNA, 25 bp, synthetic construct
  misc_feature 1..25: note = Oligonucleotide
  source 1..25: mol_type = other DNA
tgaatgaacacgtacaaaaaatgaa

SEQ ID NO: 31754 - DNA, 25 bp, synthetic construct
  misc_feature 1..25: note = Oligonucleotide
  source 1..25: mol_type = other DNA
ggatgaatgaacacgtacaaaaaat

SEQ ID NO: 31755 - DNA, 25 bp, synthetic construct
  misc_feature 1..25: note = Oligonucleotide
  source 1..25: mol_type = other DNA
aaaggatgaatgaacacgtacaaaa

SEQ ID NO: 31756 - DNA, 25 bp, synthetic construct
  misc_feature 1..25: note = Oligonucleotide
  source 1..25: mol_type = other DNA
ctgaaaggatgaatgaacacgtaca

SEQ ID NO: 31757 - DNA, 25 bp, synthetic construct
  misc_feature 1..25: note = Oligonucleotide
  source 1..25: mol_type = other DNA
ctgctgaaaggatgaatgaacacgt

SEQ ID NO: 31758 - DNA, 25 bp, synthetic construct
  misc_feature 1..25: note = Oligonucleotide
  source 1..25: mol_type = other DNA
tgtctgctgaaaggatgaatgaaca

SEQ ID NO: 31759 - DNA, 25 bp, synthetic construct
  misc_feature 1..25: note = Oligonucleotide
  source 1..25: mol_type = other DNA
ttgtgtctgctgaaaggatgaatga

SEQ ID NO: 31760 - DNA, 25 bp, synthetic construct
  misc_feature 1..25: note = Oligonucleotide
  source 1..25: mol_type = other DNA
gttttgtgtctgctgaaaggatgaa

SEQ ID NO: 31761 - DNA, 25 bp, synthetic construct
  misc_feature 1..25: note = Oligonucleotide
  source 1..25: mol_type = other DNA
ttagttttgtgtctgctgaaaggat

SEQ ID NO: 31762 - DNA, 25 bp, synthetic construct
  misc_feature 1..25: note = Oligonucleotide
  source 1..25: mol_type = other DNA
gtcttagttttgtgtctgctgaaag

SEQ ID NO: 31763 - DNA, 25 bp, synthetic construct
  misc_feature 1..25: note = Oligonucleotide
  source 1..25: mol_type = other DNA
caggtcttagttttgtgtctgctga

SEQ ID NO: 31764 - DNA, 25 bp, synthetic construct
  misc_feature 1..25: note = Oligonucleotide
  source 1..25: mol_type = other DNA
cagcaggtcttagttttgtgtctgc

SEQ ID NO: 31765 - DNA, 25 bp, synthetic construct
  misc_feature 1..25: note = Oligonucleotide
  source 1..25: mol_type = other DNA
acacagcaggtcttagttttgtgtc

SEQ ID NO: 31766 - DNA, 25 bp, synthetic construct
  misc_feature 1..25: note = Oligonucleotide
  source 1..25: mol_type = other DNA
ctcacacagcaggtcttagttttgt

SEQ ID NO: 31767 - DNA, 25 bp, synthetic construct
  misc_feature 1..25: note = Oligonucleotide
  source 1..25: mol_type = other DNA
cccctcacacagcaggtcttagttt

SEQ ID NO: 31768 - DNA, 25 bp, synthetic construct
  misc_feature 1..25: note = Oligonucleotide
  source 1..25: mol_type = other DNA
gagcccctcacacagcaggtcttag

SEQ ID NO: 31769 - DNA, 25 bp, synthetic construct
  misc_feature 1..25: note = Oligonucleotide
  source 1..25: mol_type = other DNA
ctggagcccctcacacagcaggtct

SEQ ID NO: 31770 - DNA, 25 bp, synthetic construct
  misc_feature 1..25: note = Oligonucleotide
  source 1..25: mol_type = other DNA
gagctggagcccctcacacagcagg

SEQ ID NO: 31771 - DNA, 25 bp, synthetic construct
  misc_feature 1..25: note = Oligonucleotide
  source 1..25: mol_type = other DNA
ggtgagctggagcccctcacacagc

SEQ ID NO: 31772 - DNA, 25 bp, synthetic construct
  misc_feature 1..25: note = Oligonucleotide
  source 1..25: mol_type = other DNA
gcaggtgagctggagcccctcacac

SEQ ID NO: 31773 - DNA, 25 bp, synthetic construct
  misc_feature 1..25: note = Oligonucleotide
  source 1..25: mol_type = other DNA
agagcaggtgagctggagcccctca

SEQ ID NO: 31774 - DNA, 25 bp, synthetic construct
  misc_feature 1..25: note = Oligonucleotide
  source 1..25: mol_type = other DNA
cacagagcaggtgagctggagcccc

SEQ ID NO: 31775 - DNA, 25 bp, synthetic construct
  misc_feature 1..25: note = Oligonucleotide
  source 1..25: mol_type = other DNA
ccccacagagcaggtgagctggagc

SEQ ID NO: 31776 - DNA, 25 bp, synthetic construct
  misc_feature 1..25: note = Oligonucleotide
  source 1..25: mol_type = other DNA
catccccacagagcaggtgagctgg

SEQ ID NO: 31777 - DNA, 25 bp, synthetic construct
  misc_feature 1..25: note = Oligonucleotide
  source 1..25: mol_type = other DNA
tgccatccccacagagcaggtgagc

SEQ ID NO: 31778 - DNA, 25 bp, synthetic construct
  misc_feature 1..25: note = Oligonucleotide
  source 1..25: mol_type = other DNA
ttctgccatccccacagagcaggtg

SEQ ID NO: 31779 - DNA, 25 bp, synthetic construct
  misc_feature 1..25: note = Oligonucleotide
  source 1..25: mol_type = other DNA
gaattctgccatccccacagagcag

SEQ ID NO: 31780 - DNA, 25 bp, synthetic construct
  misc_feature 1..25: note = Oligonucleotide
  source 1..25: mol_type = other DNA
acagaattctgccatccccacagag

SEQ ID NO: 31781 - DNA, 25 bp, synthetic construct
  misc_feature 1..25: note = Oligonucleotide
  source 1..25: mol_type = other DNA
aaaacagaattctgccatccccaca

SEQ ID NO: 31782 - DNA, 25 bp, synthetic construct
  misc_feature 1..25: note = Oligonucleotide
  source 1..25: mol_type = other DNA
gaaaaaacagaattctgccatcccc

SEQ ID NO: 31783 - DNA, 25 bp, synthetic construct
  misc_feature 1..25: note = Oligonucleotide
  source 1..25: mol_type = other DNA
aaggaaaaaacagaattctgccatc

SEQ ID NO: 31784 - DNA, 25 bp, synthetic construct
  misc_feature 1..25: note = Oligonucleotide
  source 1..25: mol_type = other DNA
aggaaggaaaaaacagaattctgcc

SEQ ID NO: 31785 - DNA, 25 bp, synthetic construct
  misc_feature 1..25: note = Oligonucleotide
  source 1..25: mol_type = other DNA
gcgaggaaggaaaaaacagaattct

SEQ ID NO: 31786 - DNA, 25 bp, synthetic construct
  misc_feature 1..25: note = Oligonucleotide
  source 1..25: mol_type = other DNA
tttgcgaggaaggaaaaaacagaat

SEQ ID NO: 31787 - DNA, 25 bp, synthetic construct
  misc_feature 1..25: note = Oligonucleotide
  source 1..25: mol_type = other DNA
atgtttgcgaggaaggaaaaaacag

SEQ ID NO: 31788 - DNA, 25 bp, synthetic construct
  misc_feature 1..25: note = Oligonucleotide
  source 1..25: mol_type = other DNA
taaatgtttgcgaggaaggaaaaaa

SEQ ID NO: 31789 - DNA, 25 bp, synthetic construct
  misc_feature 1..25: note = Oligonucleotide
  source 1..25: mol_type = other DNA
caataaatgtttgcgaggaaggaaa

SEQ ID NO: 31790 - DNA, 25 bp, synthetic construct
  misc_feature 1..25: note = Oligonucleotide
  source 1..25: mol_type = other DNA
acccaataaatgtttgcgaggaagg

SEQ ID NO: 31791 - DNA, 25 bp, synthetic construct
  misc_feature 1..25: note = Oligonucleotide
  source 1..25: mol_type = other DNA
ggcacccaataaatgtttgcgagga

SEQ ID NO: 31792 - DNA, 25 bp, synthetic construct
  misc_feature 1..25: note = Oligonucleotide
  source 1..25: mol_type = other DNA
ccaggcacccaataaatgtttgcga

SEQ ID NO: 31793 - DNA, 25 bp, synthetic construct
  misc_feature 1..25: note = Oligonucleotide
  source 1..25: mol_type = other DNA
gcaccaggcacccaataaatgtttg

SEQ ID NO: 31794 - DNA, 25 bp, synthetic construct
  misc_feature 1..25: note = Oligonucleotide
  source 1..25: mol_type = other DNA
gacgcaccaggcacccaataaatgt

SEQ ID NO: 31795 - DNA, 25 bp, synthetic construct
  misc_feature 1..25: note = Oligonucleotide
  source 1..25: mol_type = other DNA
tctgacgcaccaggcacccaataaa

SEQ ID NO: 31796 - DNA, 25 bp, synthetic construct
  misc_feature 1..25: note = Oligonucleotide
  source 1..25: mol_type = other DNA
acctctgacgcaccaggcacccaat

SEQ ID NO: 31797 - DNA, 25 bp, synthetic construct
  misc_feature 1..25: note = Oligonucleotide
  source 1..25: mol_type = other DNA
accacctctgacgcaccaggcaccc

SEQ ID NO: 31798 - DNA, 25 bp, synthetic construct
  misc_feature 1..25: note = Oligonucleotide
  source 1..25: mol_type = other DNA
cccaccacctctgacgcaccaggca

SEQ ID NO: 31799 - DNA, 25 bp, synthetic construct
  misc_feature 1..25: note = Oligonucleotide
  source 1..25: mol_type = other DNA
agacccaccacctctgacgcaccag

SEQ ID NO: 31800 - DNA, 25 bp, synthetic construct
  misc_feature 1..25: note = Oligonucleotide
  source 1..25: mol_type = other DNA
ctgagacccaccacctctgacgcac

SEQ ID NO: 31801 - DNA, 25 bp, synthetic construct
  misc_feature 1..25: note = Oligonucleotide
  source 1..25: mol_type = other DNA
ttcctgagacccaccacctctgacg

SEQ ID NO: 31802 - DNA, 25 bp, synthetic construct
  misc_feature 1..25: note = Oligonucleotide
  source 1..25: mol_type = other DNA
aacttcctgagacccaccacctctg

SEQ ID NO: 31803 - DNA, 25 bp, synthetic construct
  misc_feature 1..25: note = Oligonucleotide
  source 1..25: mol_type = other DNA
gtcaacttcctgagacccaccacct

SEQ ID NO: 31804 - DNA, 25 bp, synthetic construct
  misc_feature 1..25: note = Oligonucleotide
  source 1..25: mol_type = other DNA
gctgtcaacttcctgagacccacca

SEQ ID NO: 31805 - DNA, 25 bp, synthetic construct
  misc_feature 1..25: note = Oligonucleotide
  source 1..25: mol_type = other DNA
tcggctgtcaacttcctgagaccca

SEQ ID NO: 31806 - DNA, 25 bp, synthetic construct
  misc_feature 1..25: note = Oligonucleotide
  source 1..25: mol_type = other DNA
ccctcggctgtcaacttcctgagac

SEQ ID NO: 31807 - DNA, 25 bp, synthetic construct
  misc_feature 1..25: note = Oligonucleotide
  source 1..25: mol_type = other DNA
gggccctcggctgtcaacttcctga

SEQ ID NO: 31808 - DNA, 25 bp, synthetic construct
  misc_feature 1..25: note = Oligonucleotide
  source 1..25: mol_type = other DNA
cccgggccctcggctgtcaacttcc

SEQ ID NO: 31809 - DNA, 25 bp, synthetic construct
  misc_feature 1..25: note = Oligonucleotide
  source 1..25: mol_type = other DNA
tagcccgggccctcggctgtcaact

SEQ ID NO: 31810 - DNA, 25 bp, synthetic construct
  misc_feature 1..25: note = Oligonucleotide
  source 1..25: mol_type = other DNA
gcttagcccgggccctcggctgtca

SEQ ID NO: 31811 - DNA, 25 bp, synthetic construct
  misc_feature 1..25: note = Oligonucleotide
  source 1..25: mol_type = other DNA
gctgcttagcccgggccctcggctg

SEQ ID NO: 31812 - DNA, 25 bp, synthetic construct
  misc_feature 1..25: note = Oligonucleotide
  source 1..25: mol_type = other DNA
actgctgcttagcccgggccctcgg

SEQ ID NO: 31813 - DNA, 25 bp, synthetic construct
  misc_feature 1..25: note = Oligonucleotide
  source 1..25: mol_type = other DNA
ctaactgctgcttagcccgggccct

SEQ ID NO: 31814 - DNA, 25 bp, synthetic construct
  misc_feature 1..25: note = Oligonucleotide
  source 1..25: mol_type = other DNA
cacctaactgctgcttagcccgggc

SEQ ID NO: 31815 - DNA, 25 bp, synthetic construct
  misc_feature 1..25: note = Oligonucleotide
  source 1..25: mol_type = other DNA
gcccacctaactgctgcttagcccg

SEQ ID NO: 31816 - DNA, 25 bp, synthetic construct
  misc_feature 1..25: note = Oligonucleotide
  source 1..25: mol_type = other DNA
actgcccacctaactgctgcttagc

SEQ ID NO: 31817 - DNA, 25 bp, synthetic construct
  misc_feature 1..25: note = Oligonucleotide
  source 1..25: mol_type = other DNA
atcactgcccacctaactgctgctt

SEQ ID NO: 31818 - DNA, 25 bp, synthetic construct
  misc_feature 1..25: note = Oligonucleotide
  source 1..25: mol_type = other DNA
gggatcactgcccacctaactgctg

SEQ ID NO: 31819 - DNA, 25 bp, synthetic construct
  misc_feature 1..25: note = Oligonucleotide
  source 1..25: mol_type = other DNA
aaggggatcactgcccacctaactg

SEQ ID NO: 31820 - DNA, 25 bp, synthetic construct
  misc_feature 1..25: note = Oligonucleotide
  source 1..25: mol_type = other DNA
cataaggggatcactgcccacctaa

SEQ ID NO: 31821 - DNA, 25 bp, synthetic construct
  misc_feature 1..25: note = Oligonucleotide
  source 1..25: mol_type = other DNA
ccccataaggggatcactgcccacc

SEQ ID NO: 31822 - DNA, 25 bp, synthetic construct
  misc_feature 1..25: note = Oligonucleotide
  source 1..25: mol_type = other DNA
cagccccataaggggatcactgccc

SEQ ID NO: 31823 - DNA, 25 bp, synthetic construct
  misc_feature 1..25: note = Oligonucleotide
  source 1..25: mol_type = other DNA
gggcagccccataaggggatcactg

SEQ ID NO: 31824 - DNA, 25 bp, synthetic construct
  misc_feature 1..25: note = Oligonucleotide
  source 1..25: mol_type = other DNA
ccagggcagccccataaggggatca

SEQ ID NO: 31825 - DNA, 25 bp, synthetic construct
  misc_feature 1..25: note = Oligonucleotide
  source 1..25: mol_type = other DNA
tcaccagggcagccccataagggga

SEQ ID NO: 31826 - DNA, 25 bp, synthetic construct
  misc_feature 1..25: note = Oligonucleotide
  source 1..25: mol_type = other DNA
cactcaccagggcagccccataagg

SEQ ID NO: 31827 - DNA, 25 bp, synthetic construct
  misc_feature 1..25: note = Oligonucleotide
  source 1..25: mol_type = other DNA
gtccactcaccagggcagccccata

SEQ ID NO: 31828 - DNA, 25 bp, synthetic construct
  misc_feature 1..25: note = Oligonucleotide
  source 1..25: mol_type = other DNA
cttgtccactcaccagggcagcccc

SEQ ID NO: 31829 - DNA, 25 bp, synthetic construct
  misc_feature 1..25: note = Oligonucleotide
  source 1..25: mol_type = other DNA
acccttgtccactcaccagggcagc

SEQ ID NO: 31830 - DNA, 25 bp, synthetic construct
  misc_feature 1..25: note = Oligonucleotide
  source 1..25: mol_type = other DNA
cagacccttgtccactcaccagggc

SEQ ID NO: 31831 - DNA, 25 bp, synthetic construct
  misc_feature 1..25: note = Oligonucleotide
  source 1..25: mol_type = other DNA
ctgcagacccttgtccactcaccag

SEQ ID NO: 31832 - DNA, 25 bp, synthetic construct
  misc_feature 1..25: note = Oligonucleotide
  source 1..25: mol_type = other DNA
gagctgcagacccttgtccactcac

SEQ ID NO: 31833 - DNA, 25 bp, synthetic construct
  misc_feature 1..25: note = Oligonucleotide
  source 1..25: mol_type = other DNA
cgagagctgcagacccttgtccact

SEQ ID NO: 31834 - DNA, 25 bp, synthetic construct
  misc_feature 1..25: note = Oligonucleotide
  source 1..25: mol_type = other DNA
tcccgagagctgcagacccttgtcc

SEQ ID NO: 31835 - DNA, 25 bp, synthetic construct
  misc_feature 1..25: note = Oligonucleotide
  source 1..25: mol_type = other DNA
ccctcccgagagctgcagacccttg

SEQ ID NO: 31836 - DNA, 25 bp, synthetic construct
  misc_feature 1..25: note = Oligonucleotide
  source 1..25: mol_type = other DNA
agcccctcccgagagctgcagaccc

SEQ ID NO: 31837 - DNA, 25 bp, synthetic construct
  misc_feature 1..25: note = Oligonucleotide
  source 1..25: mol_type = other DNA
ctcagcccctcccgagagctgcaga

SEQ ID NO: 31838 - DNA, 25 bp, synthetic construct
  misc_feature 1..25: note = Oligonucleotide
  source 1..25: mol_type = other DNA
ttcctcagcccctcccgagagctgc

SEQ ID NO: 31839 - DNA, 25 bp, synthetic construct
  misc_feature 1..25: note = Oligonucleotide
  source 1..25: mol_type = other DNA
aacttcctcagcccctcccgagagc

SEQ ID NO: 31840 - DNA, 25 bp, synthetic construct
  misc_feature 1..25: note = Oligonucleotide
  source 1..25: mol_type = other DNA
ccgaacttcctcagcccctcccgag

SEQ ID NO: 31841 - DNA, 25 bp, synthetic construct
  misc_feature 1..25: note = Oligonucleotide
  source 1..25: mol_type = other DNA
gcaccgaacttcctcagcccctccc

SEQ ID NO: 31842 - DNA, 25 bp, synthetic construct
  misc_feature 1..25: note = Oligonucleotide
  source 1..25: mol_type = other DNA
ggggcaccgaacttcctcagcccct

SEQ ID NO: 31843 - DNA, 25 bp, synthetic construct
  misc_feature 1..25: note = Oligonucleotide
  source 1..25: mol_type = other DNA
ctcggggcaccgaacttcctcagcc

SEQ ID NO: 31844 - DNA, 25 bp, synthetic construct
  misc_feature 1..25: note = Oligonucleotide
  source 1..25: mol_type = other DNA
ctcctcggggcaccgaacttcctca

SEQ ID NO: 31845 - DNA, 25 bp, synthetic construct
  misc_feature 1..25: note = Oligonucleotide
  source 1..25: mol_type = other DNA
tctctcctcggggcaccgaacttcc

SEQ ID NO: 31846 - DNA, 25 bp, synthetic construct
  misc_feature 1..25: note = Oligonucleotide
  source 1..25: mol_type = other DNA
acttctctcctcggggcaccgaact

SEQ ID NO: 31847 - DNA, 25 bp, synthetic construct
  misc_feature 1..25: note = Oligonucleotide
  source 1..25: mol_type = other DNA
gtgacttctctcctcggggcaccga

SEQ ID NO: 31848 - DNA, 25 bp, synthetic construct
  misc_feature 1..25: note = Oligonucleotide
  source 1..25: mol_type = other DNA
ggggtgacttctctcctcggggcac

SEQ ID NO: 31849 - DNA, 25 bp, synthetic construct
  misc_feature 1..25: note = Oligonucleotide
  source 1..25: mol_type = other DNA
cagggggtgacttctctcctcgggg

SEQ ID NO: 31850 - DNA, 25 bp, synthetic construct
  misc_feature 1..25: note = Oligonucleotide
  source 1..25: mol_type = other DNA
ccccagggggtgacttctctcctcg

SEQ ID NO: 31851 - DNA, 25 bp, synthetic construct
  misc_feature 1..25: note = Oligonucleotide
  source 1..25: mol_type = other DNA
ctcccccagggggtgacttctctcc

SEQ ID NO: 31852 - DNA, 25 bp, synthetic construct
  misc_feature 1..25: note = Oligonucleotide
  source 1..25: mol_type = other DNA
cgcctcccccagggggtgacttctc

SEQ ID NO: 31853 - DNA, 25 bp, synthetic construct
  misc_feature 1..25: note = Oligonucleotide
  source 1..25: mol_type = other DNA
cctcgcctcccccagggggtgactt

SEQ ID NO: 31854 - DNA, 25 bp, synthetic construct
  misc_feature 1..25: note = Oligonucleotide
  source 1..25: mol_type = other DNA
cagcctcgcctcccccagggggtga

SEQ ID NO: 31855 - DNA, 25 bp, synthetic construct
  misc_feature 1..25: note = Oligonucleotide
  source 1..25: mol_type = other DNA
gcccagcctcgcctcccccaggggg

SEQ ID NO: 31856 - DNA, 25 bp, synthetic construct
  misc_feature 1..25: note = Oligonucleotide
  source 1..25: mol_type = other DNA
agggcccagcctcgcctcccccagg

SEQ ID NO: 31857 - DNA, 25 bp, synthetic construct
  misc_feature 1..25: note = Oligonucleotide
  source 1..25: mol_type = other DNA
tgcagggcccagcctcgcctccccc

SEQ ID NO: 31858 - DNA, 25 bp, synthetic construct
  misc_feature 1..25: note = Oligonucleotide
  source 1..25: mol_type = other DNA
cggtgcagggcccagcctcgcctcc

SEQ ID NO: 31859 - DNA, 25 bp, synthetic construct
  misc_feature 1..25: note = Oligonucleotide
  source 1..25: mol_type = other DNA
gcgcggtgcagggcccagcctcgcc

SEQ ID NO: 31860 - DNA, 25 bp, synthetic construct
  misc_feature 1..25: note = Oligonucleotide
  source 1..25: mol_type = other DNA
cccgcgcggtgcagggcccagcctc

SEQ ID NO: 31861 - DNA, 25 bp, synthetic construct
  misc_feature 1..25: note = Oligonucleotide
  source 1..25: mol_type = other DNA
cgacccgcgcggtgcagggcccagc

SEQ ID NO: 31862 - DNA, 25 bp, synthetic construct
  misc_feature 1..25: note = Oligonucleotide
  source 1..25: mol_type = other DNA
cagcgacccgcgcggtgcagggccc

SEQ ID NO: 31863 - DNA, 25 bp, synthetic construct
  misc_feature 1..25: note = Oligonucleotide
  source 1..25: mol_type = other DNA
gcgcagcgacccgcgcggtgcaggg

SEQ ID NO: 31864 - DNA, 25 bp, synthetic construct
  misc_feature 1..25: note = Oligonucleotide
  source 1..25: mol_type = other DNA
agggcgcagcgacccgcgcggtgca

SEQ ID NO: 31865 - DNA, 25 bp, synthetic construct
  misc_feature 1..25: note = Oligonucleotide
  source 1..25: mol_type = other DNA
cagagggcgcagcgacccgcgcggt

SEQ ID NO: 31866 - DNA, 25 bp, synthetic construct
  misc_feature 1..25: note = Oligonucleotide
  source 1..25: mol_type = other DNA
cgacagagggcgcagcgacccgcgc

SEQ ID NO: 31867 - DNA, 25 bp, synthetic construct
  misc_feature 1..25: note = Oligonucleotide
  source 1..25: mol_type = other DNA
aaccgacagagggcgcagcgacccg

SEQ ID NO: 31868 - DNA, 25 bp, synthetic construct
  misc_feature 1..25: note = Oligonucleotide
  source 1..25: mol_type = other DNA
ctcaaccgacagagggcgcagcgac

SEQ ID NO: 31869 - DNA, 25 bp, synthetic construct
  misc_feature 1..25: note = Oligonucleotide
  source 1..25: mol_type = other DNA
cggctcaaccgacagagggcgcagc

SEQ ID NO: 31870 - DNA, 25 bp, synthetic construct
  misc_feature 1..25: note = Oligonucleotide
  source 1..25: mol_type = other DNA
gtccggctcaaccgacagagggcgc

SEQ ID NO: 31871 - DNA, 25 bp, synthetic construct
  misc_feature 1..25: note = Oligonucleotide
  source 1..25: mol_type = other DNA
ccggtccggctcaaccgacagaggg

SEQ ID NO: 31872 - DNA, 25 bp, synthetic construct
  misc_feature 1..25: note = Oligonucleotide
  source 1..25: mol_type = other DNA
gtcccggtccggctcaaccgacaga

SEQ ID NO: 31873 - DNA, 25 bp, synthetic construct
  misc_feature 1..25: note = Oligonucleotide
  source 1..25: mol_type = other DNA
cgggtcccggtccggctcaaccgac

SEQ ID NO: 31874 - DNA, 25 bp, synthetic construct
  misc_feature 1..25: note = Oligonucleotide
  source 1..25: mol_type = other DNA
ggtcgggtcccggtccggctcaacc

SEQ ID NO: 31875 - DNA, 25 bp, synthetic construct
  misc_feature 1..25: note = Oligonucleotide
  source 1..25: mol_type = other DNA
gggggtcgggtcccggtccggctca

SEQ ID NO: 31876 - DNA, 25 bp, synthetic construct
  misc_feature 1..25: note = Oligonucleotide
  source 1..25: mol_type = other DNA
gatgggggtcgggtcccggtccggc

SEQ ID NO: 31877 - DNA, 25 bp, synthetic construct
  misc_feature 1..25: note = Oligonucleotide
  source 1..25: mol_type = other DNA
gctgatgggggtcgggtcccggtcc

SEQ ID NO: 31878 - DNA, 25 bp, synthetic construct
  misc_feature 1..25: note = Oligonucleotide
  source 1..25: mol_type = other DNA
ggggctgatgggggtcgggtcccgg

SEQ ID NO: 31879 - DNA, 25 bp, synthetic construct
  misc_feature 1..25: note = Oligonucleotide
  source 1..25: mol_type = other DNA
tggggggctgatgggggtcgggtcc

SEQ ID NO: 31880 - DNA, 25 bp, synthetic construct
  misc_feature 1..25: note = Oligonucleotide
  source 1..25: mol_type = other DNA
tactggggggctgatgggggtcggg

SEQ ID NO: 31881 - DNA, 25 bp, synthetic construct
  misc_feature 1..25: note = Oligonucleotide
  source 1..25: mol_type = other DNA
tgatactggggggctgatgggggtc

SEQ ID NO: 31882 - DNA, 25 bp, synthetic construct
  misc_feature 1..25: note = Oligonucleotide
  source 1..25: mol_type = other DNA
gtgtgatactggggggctgatgggg

SEQ ID NO: 31883 - DNA, 25 bp, synthetic construct
  misc_feature 1..25: note = Oligonucleotide
  source 1..25: mol_type = other DNA
cccgtgtgatactggggggctgatg

SEQ ID NO: 31884 - DNA, 25 bp, synthetic construct
  misc_feature 1..25: note = Oligonucleotide
  source 1..25: mol_type = other DNA
tgccccgtgtgatactggggggctg

SEQ ID NO: 31885 - DNA, 25 bp, synthetic construct
  misc_feature 1..25: note = Oligonucleotide
  source 1..25: mol_type = other DNA
ccgtgccccgtgtgatactgggggg

SEQ ID NO: 31886 - DNA, 25 bp, synthetic construct
  misc_feature 1..25: note = Oligonucleotide
  source 1..25: mol_type = other DNA
ccgccgtgccccgtgtgatactggg

SEQ ID NO: 31887 - DNA, 25 bp, synthetic construct
  misc_feature 1..25: note = Oligonucleotide
  source 1..25: mol_type = other DNA
cccccgccgtgccccgtgtgatact

SEQ ID NO: 31888 - DNA, 25 bp, synthetic construct
  misc_feature 1..25: note = Oligonucleotide
  source 1..25: mol_type = other DNA
actcccccgccgtgccccgtgtgat

SEQ ID NO: 31889 - DNA, 25 bp, synthetic construct
  misc_feature 1..25: note = Oligonucleotide
  source 1..25: mol_type = other DNA
caaactcccccgccgtgccccgtgt

SEQ ID NO: 31890 - DNA, 25 bp, synthetic construct
  misc_feature 1..25: note = Oligonucleotide
  source 1..25: mol_type = other DNA
gcccaaactcccccgccgtgccccg

SEQ ID NO: 31891 - DNA, 25 bp, synthetic construct
  misc_feature 1..25: note = Oligonucleotide
  source 1..25: mol_type = other DNA
tcagcccaaactcccccgccgtgcc

SEQ ID NO: 31892 - DNA, 25 bp, synthetic construct
  misc_feature 1..25: note = Oligonucleotide
  source 1..25: mol_type = other DNA
ctctcagcccaaactcccccgccgt

SEQ ID NO: 31893 - DNA, 25 bp, synthetic construct
  misc_feature 1..25: note = Oligonucleotide
  source 1..25: mol_type = other DNA
gggctctcagcccaaactcccccgc

SEQ ID NO: 31894 - DNA, 25 bp, synthetic construct
  misc_feature 1..25: note = Oligonucleotide
  source 1..25: mol_type = other DNA
gacgggctctcagcccaaactcccc

SEQ ID NO: 31895 - DNA, 25 bp, synthetic construct
  misc_feature 1..25: note = Oligonucleotide
  source 1..25: mol_type = other DNA
agtgacgggctctcagcccaaactc

SEQ ID NO: 31896 - DNA, 25 bp, synthetic construct
  misc_feature 1..25: note = Oligonucleotide
  source 1..25: mol_type = other DNA
ttaagtgacgggctctcagcccaaa

SEQ ID NO: 31897 - DNA, 25 bp, synthetic construct
  misc_feature 1..25: note = Oligonucleotide
  source 1..25: mol_type = other DNA
ctgttaagtgacgggctctcagccc

SEQ ID NO: 31898 - DNA, 25 bp, synthetic construct
  misc_feature 1..25: note = Oligonucleotide
  source 1..25: mol_type = other DNA
cagctgttaagtgacgggctctcag

SEQ ID NO: 31899 - DNA, 25 bp, synthetic construct
  misc_feature 1..25: note = Oligonucleotide
  source 1..25: mol_type = other DNA
ggccagctgttaagtgacgggctct

SEQ ID NO: 31900 - DNA, 25 bp, synthetic construct
  misc_feature 1..25: note = Oligonucleotide
  source 1..25: mol_type = other DNA
ctgggccagctgttaagtgacgggc

SEQ ID NO: 31901 - DNA, 25 bp, synthetic construct
  misc_feature 1..25: note = Oligonucleotide
  source 1..25: mol_type = other DNA
cccctgggccagctgttaagtgacg

SEQ ID NO: 31902 - DNA, 25 bp, synthetic construct
  misc_feature 1..25: note = Oligonucleotide
  source 1..25: mol_type = other DNA
tgacccctgggccagctgttaagtg

SEQ ID NO: 31903 - DNA, 25 bp, synthetic construct
  misc_feature 1..25: note = Oligonucleotide
  source 1..25: mol_type = other DNA
tcctgacccctgggccagctgttaa

SEQ ID NO: 31904 - DNA, 25 bp, synthetic construct
  misc_feature 1..25: note = Oligonucleotide
  source 1..25: mol_type = other DNA
acatcctgacccctgggccagctgt

SEQ ID NO: 31905 - DNA, 25 bp, synthetic construct
  misc_feature 1..25: note = Oligonucleotide
  source 1..25: mol_type = other DNA
ctaacatcctgacccctgggccagc

SEQ ID NO: 31906 - DNA, 25 bp, synthetic construct
  misc_feature 1..25: note = Oligonucleotide
  source 1..25: mol_type = other DNA
actctaacatcctgacccctgggcc

SEQ ID NO: 31907 - DNA, 25 bp, synthetic construct
  misc_feature 1..25: note = Oligonucleotide
  source 1..25: mol_type = other DNA
actactctaacatcctgacccctgg

SEQ ID NO: 31908 - DNA, 25 bp, synthetic construct
  misc_feature 1..25: note = Oligonucleotide
  source 1..25: mol_type = other DNA
tgaactactctaacatcctgacccc

SEQ ID NO: 31909 - DNA, 25 bp, synthetic construct
  misc_feature 1..25: note = Oligonucleotide
  source 1..25: mol_type = other DNA
acctgaactactctaacatcctgac

SEQ ID NO: 31910 - DNA, 25 bp, synthetic construct
  misc_feature 1..25: note = Oligonucleotide
  source 1..25: mol_type = other DNA
aacacctgaactactctaacatcct

SEQ ID NO: 31911 - DNA, 25 bp, synthetic construct
  misc_feature 1..25: note = Oligonucleotide
  source 1..25: mol_type = other DNA
gccaacacctgaactactctaacat

SEQ ID NO: 31912 - DNA, 25 bp, synthetic construct
  misc_feature 1..25: note = Oligonucleotide
  source 1..25: mol_type = other DNA
gttgccaacacctgaactactctaa

SEQ ID NO: 31913 - DNA, 25 bp, synthetic construct
  misc_feature 1..25: note = Oligonucleotide
  source 1..25: mol_type = other DNA
gcagttgccaacacctgaactactc

SEQ ID NO: 31914 - DNA, 25 bp, synthetic construct
  misc_feature 1..25: note = Oligonucleotide
  source 1..25: mol_type = other DNA
cacgcagttgccaacacctgaacta

SEQ ID NO: 31915 - DNA, 25 bp, synthetic construct
  misc_feature 1..25: note = Oligonucleotide
  source 1..25: mol_type = other DNA
cgtcacgcagttgccaacacctgaa

SEQ ID NO: 31916 - DNA, 25 bp, synthetic construct
  misc_feature 1..25: note = Oligonucleotide
  source 1..25: mol_type = other DNA
gtccgtcacgcagttgccaacacct

SEQ ID NO: 31917 - DNA, 25 bp, synthetic construct
  misc_feature 1..25: note = Oligonucleotide
  source 1..25: mol_type = other DNA
gctgtccgtcacgcagttgccaaca

SEQ ID NO: 31918 - DNA, 25 bp, synthetic construct
  misc_feature 1..25: note = Oligonucleotide
  source 1..25: mol_type = other DNA
tgggctgtccgtcacgcagttgcca

SEQ ID NO: 31919 - DNA, 25 bp, synthetic construct
  misc_feature 1..25: note = Oligonucleotide
  source 1..25: mol_type = other DNA
ctgtgggctgtccgtcacgcagttg

SEQ ID NO: 31920 - DNA, 25 bp, synthetic construct
  misc_feature 1..25: note = Oligonucleotide
  source 1..25: mol_type = other DNA
ctcctgtgggctgtccgtcacgcag

SEQ ID NO: 31921 - DNA, 25 bp, synthetic construct
  misc_feature 1..25: note = Oligonucleotide
  source 1..25: mol_type = other DNA
cccctcctgtgggctgtccgtcacg

SEQ ID NO: 31922 - DNA, 25 bp, synthetic construct
  misc_feature 1..25: note = Oligonucleotide
  source 1..25: mol_type = other DNA
cttcccctcctgtgggctgtccgtc

SEQ ID NO: 31923 - DNA, 25 bp, synthetic construct
  misc_feature 1..25: note = Oligonucleotide
  source 1..25: mol_type = other DNA
ctccttcccctcctgtgggctgtcc

SEQ ID NO: 31924 - DNA, 25 bp, synthetic construct
  misc_feature 1..25: note = Oligonucleotide
  source 1..25: mol_type = other DNA
cctctccttcccctcctgtgggctg

SEQ ID NO: 31925 - DNA, 25 bp, synthetic construct
  misc_feature 1..25: note = Oligonucleotide
  source 1..25: mol_type = other DNA
gcacctctccttcccctcctgtggg

SEQ ID NO: 31926 - DNA, 25 bp, synthetic construct
  misc_feature 1..25: note = Oligonucleotide
  source 1..25: mol_type = other DNA
ggggcacctctccttcccctcctgt

SEQ ID NO: 31927 - DNA, 25 bp, synthetic construct
  misc_feature 1..25: note = Oligonucleotide
  source 1..25: mol_type = other DNA
cacggggcacctctccttcccctcc

SEQ ID NO: 31928 - DNA, 25 bp, synthetic construct
  misc_feature 1..25: note = Oligonucleotide
  source 1..25: mol_type = other DNA
tcacacggggcacctctccttcccc

SEQ ID NO: 31929 - DNA, 25 bp, synthetic construct
  misc_feature 1..25: note = Oligonucleotide
  source 1..25: mol_type = other DNA
tagtcacacggggcacctctccttc

SEQ ID NO: 31930 - DNA, 25 bp, synthetic construct
  misc_feature 1..25: note = Oligonucleotide
  source 1..25: mol_type = other DNA
ctctagtcacacggggcacctctcc

SEQ ID NO: 31931 - DNA, 25 bp, synthetic construct
  misc_feature 1..25: note = Oligonucleotide
  source 1..25: mol_type = other DNA
acgctctagtcacacggggcacctc

SEQ ID NO: 31932 - DNA, 25 bp, synthetic construct
  misc_feature 1..25: note = Oligonucleotide
  source 1..25: mol_type = other DNA
gctacgctctagtcacacggggcac

SEQ ID NO: 31933 - DNA, 25 bp, synthetic construct
  misc_feature 1..25: note = Oligonucleotide
  source 1..25: mol_type = other DNA
tttgctacgctctagtcacacgggg

SEQ ID NO: 31934 - DNA, 25 bp, synthetic construct
  misc_feature 1..25: note = Oligonucleotide
  source 1..25: mol_type = other DNA
cagtttgctacgctctagtcacacg

SEQ ID NO: 31935 - DNA, 25 bp, synthetic construct
  misc_feature 1..25: note = Oligonucleotide
  source 1..25: mol_type = other DNA
tggcagtttgctacgctctagtcac

SEQ ID NO: 31936 - DNA, 25 bp, synthetic construct
  misc_feature 1..25: note = Oligonucleotide
  source 1..25: mol_type = other DNA
gcttggcagtttgctacgctctagt

SEQ ID NO: 31937 - DNA, 25 bp, synthetic construct
  misc_feature 1..25: note = Oligonucleotide
  source 1..25: mol_type = other DNA
cgggcttggcagtttgctacgctct

SEQ ID NO: 31938 - DNA, 25 bp, synthetic construct
  misc_feature 1..25: note = Oligonucleotide
  source 1..25: mol_type = other DNA
cctcgggcttggcagtttgctacgc

SEQ ID NO: 31939 - DNA, 25 bp, synthetic construct
  misc_feature 1..25: note = Oligonucleotide
  source 1..25: mol_type = other DNA
ctccctcgggcttggcagtttgcta

SEQ ID NO: 31940 - DNA, 25 bp, synthetic construct
  misc_feature 1..25: note = Oligonucleotide
  source 1..25: mol_type = other DNA
aggctccctcgggcttggcagtttg

SEQ ID NO: 31941 - DNA, 25 bp, synthetic construct
  misc_feature 1..25: note = Oligonucleotide
  source 1..25: mol_type = other DNA
gccaggctccctcgggcttggcagt

SEQ ID NO: 31942 - DNA, 25 bp, synthetic construct
  misc_feature 1..25: note = Oligonucleotide
  source 1..25: mol_type = other DNA
agagccaggctccctcgggcttggc

SEQ ID NO: 31943 - DNA, 25 bp, synthetic construct
  misc_feature 1..25: note = Oligonucleotide
  source 1..25: mol_type = other DNA
ccaagagccaggctccctcgggctt

SEQ ID NO: 31944 - DNA, 25 bp, synthetic construct
  misc_feature 1..25: note = Oligonucleotide
  source 1..25: mol_type = other DNA
tttccaagagccaggctccctcggg

SEQ ID NO: 31945 - DNA, 25 bp, synthetic construct
  misc_feature 1..25: note = Oligonucleotide
  source 1..25: mol_type = other DNA
gcttttccaagagccaggctccctc

SEQ ID NO: 31946 - DNA, 25 bp, synthetic construct
  misc_feature 1..25: note = Oligonucleotide
  source 1..25: mol_type = other DNA
cccgcttttccaagagccaggctcc

SEQ ID NO: 31947 - DNA, 25 bp, synthetic construct
  misc_feature 1..25: note = Oligonucleotide
  source 1..25: mol_type = other DNA
ccacccgcttttccaagagccaggc

SEQ ID NO: 31948 - DNA, 25 bp, synthetic construct
  misc_feature 1..25: note = Oligonucleotide
  source 1..25: mol_type = other DNA
gagccacccgcttttccaagagcca

SEQ ID NO: 31949 - DNA, 25 bp, synthetic construct
  misc_feature 1..25: note = Oligonucleotide
  source 1..25: mol_type = other DNA
ccagagccacccgcttttccaagag

SEQ ID NO: 31950 - DNA, 25 bp, synthetic construct
  misc_feature 1..25: note = Oligonucleotide
  source 1..25: mol_type = other DNA
aggccagagccacccgcttttccaa

SEQ ID NO: 31951 - DNA, 25 bp, synthetic construct
  misc_feature 1..25: note = Oligonucleotide
  source 1..25: mol_type = other DNA
ggcaggccagagccacccgcttttc

SEQ ID NO: 31952 - DNA, 25 bp, synthetic construct
  misc_feature 1..25: note = Oligonucleotide
  source 1..25: mol_type = other DNA
ccaggcaggccagagccacccgctt

SEQ ID NO: 31953 - DNA, 25 bp, synthetic construct
  misc_feature 1..25: note = Oligonucleotide
  source 1..25: mol_type = other DNA
tacccaggcaggccagagccacccg

SEQ ID NO: 31954 - DNA, 25 bp, synthetic construct
  misc_feature 1..25: note = Oligonucleotide
  source 1..25: mol_type = other DNA
tagtacccaggcaggccagagccac

SEQ ID NO: 31955 - DNA, 25 bp, synthetic construct
  misc_feature 1..25: note = Oligonucleotide
  source 1..25: mol_type = other DNA
ccctagtacccaggcaggccagagc

SEQ ID NO: 31956 - DNA, 25 bp, synthetic construct
  misc_feature 1..25: note = Oligonucleotide
  source 1..25: mol_type = other DNA
gctccctagtacccaggcaggccag

SEQ ID NO: 31957 - DNA, 25 bp, synthetic construct
  misc_feature 1..25: note = Oligonucleotide
  source 1..25: mol_type = other DNA
gtggctccctagtacccaggcaggc

SEQ ID NO: 31958 - DNA, 25 bp, synthetic construct
  misc_feature 1..25: note = Oligonucleotide
  source 1..25: mol_type = other DNA
gcagtggctccctagtacccaggca

SEQ ID NO: 31959 - DNA, 25 bp, synthetic construct
  misc_feature 1..25: note = Oligonucleotide
  source 1..25: mol_type = other DNA
cctgcagtggctccctagtacccag

SEQ ID NO: 31960 - DNA, 25 bp, synthetic construct
  misc_feature 1..25: note = Oligonucleotide
  source 1..25: mol_type = other DNA
aagcctgcagtggctccctagtacc

SEQ ID NO: 31961 - DNA, 25 bp, synthetic construct
  misc_feature 1..25: note = Oligonucleotide
  source 1..25: mol_type = other DNA
cagaagcctgcagtggctccctagt

SEQ ID NO: 31962 - DNA, 25 bp, synthetic construct
  misc_feature 1..25: note = Oligonucleotide
  source 1..25: mol_type = other DNA
gctcagaagcctgcagtggctccct

SEQ ID NO: 31963 - DNA, 25 bp, synthetic construct
  misc_feature 1..25: note = Oligonucleotide
  source 1..25: mol_type = other DNA
tctgctcagaagcctgcagtggctc

SEQ ID NO: 31964 - DNA, 25 bp, synthetic construct
  misc_feature 1..25: note = Oligonucleotide
  source 1..25: mol_type = other DNA
ggctctgctcagaagcctgcagtgg

SEQ ID NO: 31965 - DNA, 25 bp, synthetic construct
  misc_feature 1..25: note = Oligonucleotide
  source 1..25: mol_type = other DNA
tggggctctgctcagaagcctgcag

SEQ ID NO: 31966 - DNA, 25 bp, synthetic construct
  misc_feature 1..25: note = Oligonucleotide
  source 1..25: mol_type = other DNA
cactggggctctgctcagaagcctg

SEQ ID NO: 31967 - DNA, 25 bp, synthetic construct
  misc_feature 1..25: note = Oligonucleotide
  source 1..25: mol_type = other DNA
ctccactggggctctgctcagaagc

SEQ ID NO: 31968 - DNA, 25 bp, synthetic construct
  misc_feature 1..25: note = Oligonucleotide
  source 1..25: mol_type = other DNA
ctcctccactggggctctgctcaga

SEQ ID NO: 31969 - DNA, 25 bp, synthetic construct
  misc_feature 1..25: note = Oligonucleotide
  source 1..25: mol_type = other DNA
tcactcctccactggggctctgctc

SEQ ID NO: 31970 - DNA, 25 bp, synthetic construct
  misc_feature 1..25: note = Oligonucleotide
  source 1..25: mol_type = other DNA
ctctcactcctccactggggctctg

SEQ ID NO: 31971 - DNA, 25 bp, synthetic construct
  misc_feature 1..25: note = Oligonucleotide
  source 1..25: mol_type = other DNA
gagctctcactcctccactggggct

SEQ ID NO: 31972 - DNA, 25 bp, synthetic construct
  misc_feature 1..25: note = Oligonucleotide
  source 1..25: mol_type = other DNA
cctgagctctcactcctccactggg

SEQ ID NO: 31973 - DNA, 25 bp, synthetic construct
  misc_feature 1..25: note = Oligonucleotide
  source 1..25: mol_type = other DNA
gagcctgagctctcactcctccact

SEQ ID NO: 31974 - DNA, 25 bp, synthetic construct
  misc_feature 1..25: note = Oligonucleotide
  source 1..25: mol_type = other DNA
gtagagcctgagctctcactcctcc

SEQ ID NO: 31975 - DNA, 25 bp, synthetic construct
  misc_feature 1..25: note = Oligonucleotide
  source 1..25: mol_type = other DNA
ggggtagagcctgagctctcactcc

SEQ ID NO: 31976 - DNA, 25 bp, synthetic construct
  misc_feature 1..25: note = Oligonucleotide
  source 1..25: mol_type = other DNA
actggggtagagcctgagctctcac

SEQ ID NO: 31977 - DNA, 25 bp, synthetic construct
  misc_feature 1..25: note = Oligonucleotide
  source 1..25: mol_type = other DNA
cagactggggtagagcctgagctct

SEQ ID NO: 31978 - DNA, 25 bp, synthetic construct
  misc_feature 1..25: note = Oligonucleotide
  source 1..25: mol_type = other DNA
tcccagactggggtagagcctgagc

SEQ ID NO: 31979 - DNA, 25 bp, synthetic construct
  misc_feature 1..25: note = Oligonucleotide
  source 1..25: mol_type = other DNA
cactcccagactggggtagagcctg

SEQ ID NO: 31980 - DNA, 25 bp, synthetic construct
  misc_feature 1..25: note = Oligonucleotide
  source 1..25: mol_type = other DNA
gaccactcccagactggggtagagc

SEQ ID NO: 31981 - DNA, 25 bp, synthetic construct
  misc_feature 1..25: note = Oligonucleotide
  source 1..25: mol_type = other DNA
ccagaccactcccagactggggtag

SEQ ID NO: 31982 - DNA, 25 bp, synthetic construct
  misc_feature 1..25: note = Oligonucleotide
  source 1..25: mol_type = other DNA
tccccagaccactcccagactgggg

SEQ ID NO: 31983 - DNA, 25 bp, synthetic construct
  misc_feature 1..25: note = Oligonucleotide
  source 1..25: mol_type = other DNA
ccttccccagaccactcccagactg

SEQ ID NO: 31984 - DNA, 25 bp, synthetic construct
  misc_feature 1..25: note = Oligonucleotide
  source 1..25: mol_type = other DNA
ccaccttccccagaccactcccaga

SEQ ID NO: 31985 - DNA, 25 bp, synthetic construct
  misc_feature 1..25: note = Oligonucleotide
  source 1..25: mol_type = other DNA
tgcccaccttccccagaccactccc

SEQ ID NO: 31986 - DNA, 25 bp, synthetic construct
  misc_feature 1..25: note = Oligonucleotide
  source 1..25: mol_type = other DNA
tgatgcccaccttccccagaccact

SEQ ID NO: 31987 - DNA, 25 bp, synthetic construct
  misc_feature 1..25: note = Oligonucleotide
  source 1..25: mol_type = other DNA
gcgtgatgcccaccttccccagacc

SEQ ID NO: 31988 - DNA, 25 bp, synthetic construct
  misc_feature 1..25: note = Oligonucleotide
  source 1..25: mol_type = other DNA
actgcgtgatgcccaccttccccag

SEQ ID NO: 31989 - DNA, 25 bp, synthetic construct
  misc_feature 1..25: note = Oligonucleotide
  source 1..25: mol_type = other DNA
cccactgcgtgatgcccaccttccc

SEQ ID NO: 31990 - DNA, 25 bp, synthetic construct
  misc_feature 1..25: note = Oligonucleotide
  source 1..25: mol_type = other DNA
acgcccactgcgtgatgcccacctt

SEQ ID NO: 31991 - DNA, 25 bp, synthetic construct
  misc_feature 1..25: note = Oligonucleotide
  source 1..25: mol_type = other DNA
cccacgcccactgcgtgatgcccac

SEQ ID NO: 31992 - DNA, 25 bp, synthetic construct
  misc_feature 1..25: note = Oligonucleotide
  source 1..25: mol_type = other DNA
ctgcccacgcccactgcgtgatgcc

SEQ ID NO: 31993 - DNA, 25 bp, synthetic construct
  misc_feature 1..25: note = Oligonucleotide
  source 1..25: mol_type = other DNA
cccctgcccacgcccactgcgtgat

SEQ ID NO: 31994 - DNA, 25 bp, synthetic construct
  misc_feature 1..25: note = Oligonucleotide
  source 1..25: mol_type = other DNA
cggcccctgcccacgcccactgcgt

SEQ ID NO: 31995 - DNA, 25 bp, synthetic construct
  misc_feature 1..25: note = Oligonucleotide
  source 1..25: mol_type = other DNA
caccggcccctgcccacgcccactg

SEQ ID NO: 31996 - DNA, 25 bp, synthetic construct
  misc_feature 1..25: note = Oligonucleotide
  source 1..25: mol_type = other DNA
ggacaccggcccctgcccacgccca

SEQ ID NO: 31997 - DNA, 25 bp, synthetic construct
  misc_feature 1..25: note = Oligonucleotide
  source 1..25: mol_type = other DNA
cctggacaccggcccctgcccacgc

SEQ ID NO: 31998 - DNA, 25 bp, synthetic construct
  misc_feature 1..25: note = Oligonucleotide
  source 1..25: mol_type = other DNA
cgtcctggacaccggcccctgccca

SEQ ID NO: 31999 - DNA, 25 bp, synthetic construct
  misc_feature 1..25: note = Oligonucleotide
  source 1..25: mol_type = other DNA
cctcgtcctggacaccggcccctgc

SEQ ID NO: 32000 - DNA, 25 bp, synthetic construct
  misc_feature 1..25: note = Oligonucleotide
  source 1..25: mol_type = other DNA
tcccctcgtcctggacaccggcccc

SEQ ID NO: 32001 - DNA, 25 bp, synthetic construct
  misc_feature 1..25: note = Oligonucleotide
  source 1..25: mol_type = other DNA
gggtcccctcgtcctggacaccggc

SEQ ID NO: 32002 - DNA, 25 bp, synthetic construct
  misc_feature 1..25: note = Oligonucleotide
  source 1..25: mol_type = other DNA
cctgggtcccctcgtcctggacacc

SEQ ID NO: 32003 - DNA, 25 bp, synthetic construct
  misc_feature 1..25: note = Oligonucleotide
  source 1..25: mol_type = other DNA
aggcctgggtcccctcgtcctggac

SEQ ID NO: 32004 - DNA, 25 bp, synthetic construct
  misc_feature 1..25: note = Oligonucleotide
  source 1..25: mol_type = other DNA
tctaggcctgggtcccctcgtcctg

SEQ ID NO: 32005 - DNA, 25 bp, synthetic construct
  misc_feature 1..25: note = Oligonucleotide
  source 1..25: mol_type = other DNA
ccctctaggcctgggtcccctcgtc

SEQ ID NO: 32006 - DNA, 25 bp, synthetic construct
  misc_feature 1..25: note = Oligonucleotide
  source 1..25: mol_type = other DNA
tccccctctaggcctgggtcccctc

SEQ ID NO: 32007 - DNA, 25 bp, synthetic construct
  misc_feature 1..25: note = Oligonucleotide
  source 1..25: mol_type = other DNA
cagtccccctctaggcctgggtccc

SEQ ID NO: 32008 - DNA, 25 bp, synthetic construct
  misc_feature 1..25: note = Oligonucleotide
  source 1..25: mol_type = other DNA
gcccagtccccctctaggcctgggt

SEQ ID NO: 32009 - DNA, 25 bp, synthetic construct
  misc_feature 1..25: note = Oligonucleotide
  source 1..25: mol_type = other DNA
ggtgcccagtccccctctaggcctg

SEQ ID NO: 32010 - DNA, 25 bp, synthetic construct
  misc_feature 1..25: note = Oligonucleotide
  source 1..25: mol_type = other DNA
ctgggtgcccagtccccctctaggc

SEQ ID NO: 32011 - DNA, 25 bp, synthetic construct
  misc_feature 1..25: note = Oligonucleotide
  source 1..25: mol_type = other DNA
tcgctgggtgcccagtccccctcta

SEQ ID NO: 32012 - DNA, 25 bp, synthetic construct
  misc_feature 1..25: note = Oligonucleotide
  source 1..25: mol_type = other DNA
ggatcgctgggtgcccagtccccct

SEQ ID NO: 32013 - DNA, 25 bp, synthetic construct
  misc_feature 1..25: note = Oligonucleotide
  source 1..25: mol_type = other DNA
cccggatcgctgggtgcccagtccc

SEQ ID NO: 32014 - DNA, 25 bp, synthetic construct
  misc_feature 1..25: note = Oligonucleotide
  source 1..25: mol_type = other DNA
gggcccggatcgctgggtgcccagt

SEQ ID NO: 32015 - DNA, 25 bp, synthetic construct
  misc_feature 1..25: note = Oligonucleotide
  source 1..25: mol_type = other DNA
ccagggcccggatcgctgggtgccc

SEQ ID NO: 32016 - DNA, 25 bp, synthetic construct
  misc_feature 1..25: note = Oligonucleotide
  source 1..25: mol_type = other DNA
ggtccagggcccggatcgctgggtg

SEQ ID NO: 32017 - DNA, 25 bp, synthetic construct
  misc_feature 1..25: note = Oligonucleotide
  source 1..25: mol_type = other DNA
ccaggtccagggcccggatcgctgg

SEQ ID NO: 32018 - DNA, 25 bp, synthetic construct
  misc_feature 1..25: note = Oligonucleotide
  source 1..25: mol_type = other DNA
cctccaggtccagggcccggatcgc

SEQ ID NO: 32019 - DNA, 25 bp, synthetic construct
  misc_feature 1..25: note = Oligonucleotide
  source 1..25: mol_type = other DNA
acccctccaggtccagggcccggat

SEQ ID NO: 32020 - DNA, 25 bp, synthetic construct
  misc_feature 1..25: note = Oligonucleotide
  source 1..25: mol_type = other DNA
cccacccctccaggtccagggcccg

SEQ ID NO: 32021 - DNA, 25 bp, synthetic construct
  misc_feature 1..25: note = Oligonucleotide
  source 1..25: mol_type = other DNA
ccccccacccctccaggtccagggc

SEQ ID NO: 32022 - DNA, 25 bp, synthetic construct
  misc_feature 1..25: note = Oligonucleotide
  source 1..25: mol_type = other DNA
gccccccccacccctccaggtccag

SEQ ID NO: 32023 - DNA, 25 bp, synthetic construct
  misc_feature 1..25: note = Oligonucleotide
  source 1..25: mol_type = other DNA
ggcgccccccccacccctccaggtc

SEQ ID NO: 32024 - DNA, 25 bp, synthetic construct
  misc_feature 1..25: note = Oligonucleotide
  source 1..25: mol_type = other DNA
aggggcgccccccccacccctccag

SEQ ID NO: 32025 - DNA, 25 bp, synthetic construct
  misc_feature 1..25: note = Oligonucleotide
  source 1..25: mol_type = other DNA
gggaggggcgccccccccacccctc

SEQ ID NO: 32026 - DNA, 25 bp, synthetic construct
  misc_feature 1..25: note = Oligonucleotide
  source 1..25: mol_type = other DNA
ggagggaggggcgccccccccaccc

SEQ ID NO: 32027 - DNA, 25 bp, synthetic construct
  misc_feature 1..25: note = Oligonucleotide
  source 1..25: mol_type = other DNA
acgggagggaggggcgcccccccca

SEQ ID NO: 32028 - DNA, 25 bp, synthetic construct
  misc_feature 1..25: note = Oligonucleotide
  source 1..25: mol_type = other DNA
tgaacgggagggaggggcgcccccc

SEQ ID NO: 32029 - DNA, 25 bp, synthetic construct
  misc_feature 1..25: note = Oligonucleotide
  source 1..25: mol_type = other DNA
cggtgaacgggagggaggggcgccc

SEQ ID NO: 32030 - DNA, 25 bp, synthetic construct
  misc_feature 1..25: note = Oligonucleotide
  source 1..25: mol_type = other DNA
agccggtgaacgggagggaggggcg

SEQ ID NO: 32031 - DNA, 25 bp, synthetic construct
  misc_feature 1..25: note = Oligonucleotide
  source 1..25: mol_type = other DNA
tggagccggtgaacgggagggaggg

SEQ ID NO: 32032 - DNA, 25 bp, synthetic construct
  misc_feature 1..25: note = Oligonucleotide
  source 1..25: mol_type = other DNA
gcctggagccggtgaacgggaggga

SEQ ID NO: 32033 - DNA, 25 bp, synthetic construct
  misc_feature 1..25: note = Oligonucleotide
  source 1..25: mol_type = other DNA
gccgcctggagccggtgaacgggag

SEQ ID NO: 32034 - DNA, 25 bp, synthetic construct
  misc_feature 1..25: note = Oligonucleotide
  source 1..25: mol_type = other DNA
aaagccgcctggagccggtgaacgg

SEQ ID NO: 32035 - DNA, 25 bp, synthetic construct
  misc_feature 1..25: note = Oligonucleotide
  source 1..25: mol_type = other DNA
agcaaagccgcctggagccggtgaa

SEQ ID NO: 32036 - DNA, 25 bp, synthetic construct
  misc_feature 1..25: note = Oligonucleotide
  source 1..25: mol_type = other DNA
accagcaaagccgcctggagccggt

SEQ ID NO: 32037 - DNA, 25 bp, synthetic construct
  misc_feature 1..25: note = Oligonucleotide
  source 1..25: mol_type = other DNA
ggcaccagcaaagccgcctggagcc

SEQ ID NO: 32038 - DNA, 25 bp, synthetic construct
  misc_feature 1..25: note = Oligonucleotide
  source 1..25: mol_type = other DNA
tcgggcaccagcaaagccgcctgga

SEQ ID NO: 32039 - DNA, 25 bp, synthetic construct
  misc_feature 1..25: note = Oligonucleotide
  source 1..25: mol_type = other DNA
gcttcgggcaccagcaaagccgcct

SEQ ID NO: 32040 - DNA, 25 bp, synthetic construct
  misc_feature 1..25: note = Oligonucleotide
  source 1..25: mol_type = other DNA
ggggcttcgggcaccagcaaagccg

SEQ ID NO: 32041 - DNA, 25 bp, synthetic construct
  misc_feature 1..25: note = Oligonucleotide
  source 1..25: mol_type = other DNA
gcgggggcttcgggcaccagcaaag

SEQ ID NO: 32042 - DNA, 25 bp, synthetic construct
  misc_feature 1..25: note = Oligonucleotide
  source 1..25: mol_type = other DNA
ggggcgggggcttcgggcaccagca

SEQ ID NO: 32043 - DNA, 25 bp, synthetic construct
  misc_feature 1..25: note = Oligonucleotide
  source 1..25: mol_type = other DNA
gatggggcgggggcttcgggcacca

SEQ ID NO: 32044 - DNA, 25 bp, synthetic construct
  misc_feature 1..25: note = Oligonucleotide
  source 1..25: mol_type = other DNA
ggggatggggcgggggcttcgggca

SEQ ID NO: 32045 - DNA, 25 bp, synthetic construct
  misc_feature 1..25: note = Oligonucleotide
  source 1..25: mol_type = other DNA
gcgggggatggggcgggggcttcgg

SEQ ID NO: 32046 - DNA, 25 bp, synthetic construct
  misc_feature 1..25: note = Oligonucleotide
  source 1..25: mol_type = other DNA
ggagcgggggatggggcgggggctt

SEQ ID NO: 32047 - DNA, 25 bp, synthetic construct
  misc_feature 1..25: note = Oligonucleotide
  source 1..25: mol_type = other DNA
gtgggagcgggggatggggcggggg

SEQ ID NO: 32048 - DNA, 25 bp, synthetic construct
  misc_feature 1..25: note = Oligonucleotide
  source 1..25: mol_type = other DNA
ctagtgggagcgggggatggggcgg

SEQ ID NO: 32049 - DNA, 25 bp, synthetic construct
  misc_feature 1..25: note = Oligonucleotide
  source 1..25: mol_type = other DNA
agcctagtgggagcgggggatgggg

SEQ ID NO: 32050 - DNA, 25 bp, synthetic construct
  misc_feature 1..25: note = Oligonucleotide
  source 1..25: mol_type = other DNA
ggcagcctagtgggagcgggggatg

SEQ ID NO: 32051 - DNA, 25 bp, synthetic construct
  misc_feature 1..25: note = Oligonucleotide
  source 1..25: mol_type = other DNA
cagggcagcctagtgggagcggggg

SEQ ID NO: 32052 - DNA, 25 bp, synthetic construct
  misc_feature 1..25: note = Oligonucleotide
  source 1..25: mol_type = other DNA
ggtcagggcagcctagtgggagcgg

SEQ ID NO: 32053 - DNA, 25 bp, synthetic construct
  misc_feature 1..25: note = Oligonucleotide
  source 1..25: mol_type = other DNA
ggtggtcagggcagcctagtgggag

SEQ ID NO: 32054 - DNA, 25 bp, synthetic construct
  misc_feature 1..25: note = Oligonucleotide
  source 1..25: mol_type = other DNA
gacggtggtcagggcagcctagtgg

SEQ ID NO: 32055 - DNA, 25 bp, synthetic construct
  misc_feature 1..25: note = Oligonucleotide
  source 1..25: mol_type = other DNA
cgggacggtggtcagggcagcctag

SEQ ID NO: 32056 - DNA, 25 bp, synthetic construct
  misc_feature 1..25: note = Oligonucleotide
  source 1..25: mol_type = other DNA
acgcgggacggtggtcagggcagcc

SEQ ID NO: 32057 - DNA, 25 bp, synthetic construct
  misc_feature 1..25: note = Oligonucleotide
  source 1..25: mol_type = other DNA
cggacgcgggacggtggtcagggca

SEQ ID NO: 32058 - DNA, 25 bp, synthetic construct
  misc_feature 1..25: note = Oligonucleotide
  source 1..25: mol_type = other DNA
acgcggacgcgggacggtggtcagg

SEQ ID NO: 32059 - DNA, 25 bp, synthetic construct
  misc_feature 1..25: note = Oligonucleotide
  source 1..25: mol_type = other DNA
cggacgcggacgcgggacggtggtc

SEQ ID NO: 32060 - DNA, 25 bp, synthetic construct
  misc_feature 1..25: note = Oligonucleotide
  source 1..25: mol_type = other DNA
gttcggacgcggacgcgggacggtg

SEQ ID NO: 32061 - DNA, 25 bp, synthetic construct
  misc_feature 1..25: note = Oligonucleotide
  source 1..25: mol_type = other DNA
ggagttcggacgcggacgcgggacg

SEQ ID NO: 32062 - DNA, 25 bp, synthetic construct
  misc_feature 1..25: note = Oligonucleotide
  source 1..25: mol_type = other DNA
gggggagttcggacgcggacgcggg

SEQ ID NO: 32063 - DNA, 25 bp, synthetic construct
  misc_feature 1..25: note = Oligonucleotide
  source 1..25: mol_type = other DNA
ggagggggagttcggacgcggacgc

SEQ ID NO: 32064 - DNA, 25 bp, synthetic construct
  misc_feature 1..25: note = Oligonucleotide
  source 1..25: mol_type = other DNA
ccgggagggggagttcggacgcgga

SEQ ID NO: 32065 - DNA, 25 bp, synthetic construct
  misc_feature 1..25: note = Oligonucleotide
  source 1..25: mol_type = other DNA
cccccgggagggggagttcggacgc

SEQ ID NO: 32066 - DNA, 25 bp, synthetic construct
  misc_feature 1..25: note = Oligonucleotide
  source 1..25: mol_type = other DNA
cgacccccgggagggggagttcgga

SEQ ID NO: 32067 - DNA, 25 bp, synthetic construct
  misc_feature 1..25: note = Oligonucleotide
  source 1..25: mol_type = other DNA
cgccgacccccgggagggggagttc

SEQ ID NO: 32068 - DNA, 25 bp, synthetic construct
  misc_feature 1..25: note = Oligonucleotide
  source 1..25: mol_type = other DNA
cgccgccgacccccgggagggggag

SEQ ID NO: 32069 - DNA, 25 bp, synthetic construct
  misc_feature 1..25: note = Oligonucleotide
  source 1..25: mol_type = other DNA
cctcgccgccgacccccgggagggg

SEQ ID NO: 32070 - DNA, 25 bp, synthetic construct
  misc_feature 1..25: note = Oligonucleotide
  source 1..25: mol_type = other DNA
tcccctcgccgccgacccccgggag

SEQ ID NO: 32071 - DNA, 25 bp, synthetic construct
  misc_feature 1..25: note = Oligonucleotide
  source 1..25: mol_type = other DNA
ccctcccctcgccgccgacccccgg

SEQ ID NO: 32072 - DNA, 25 bp, synthetic construct
  misc_feature 1..25: note = Oligonucleotide
  source 1..25: mol_type = other DNA
ccgccctcccctcgccgccgacccc

SEQ ID NO: 32073 - DNA, 25 bp, synthetic construct
  misc_feature 1..25: note = Oligonucleotide
  source 1..25: mol_type = other DNA
ctcccgccctcccctcgccgccgac

SEQ ID NO: 32074 - DNA, 25 bp, synthetic construct
  misc_feature 1..25: note = Oligonucleotide
  source 1..25: mol_type = other DNA
tccctcccgccctcccctcgccgcc

SEQ ID NO: 32075 - DNA, 25 bp, synthetic construct
  misc_feature 1..25: note = Oligonucleotide
  source 1..25: mol_type = other DNA
ccctccctcccgccctcccctcgcc

SEQ ID NO: 32076 - DNA, 25 bp, synthetic construct
  misc_feature 1..25: note = Oligonucleotide
  source 1..25: mol_type = other DNA
gcgccctccctcccgccctcccctc

SEQ ID NO: 32077 - DNA, 25 bp, synthetic construct
  misc_feature 1..25: note = Oligonucleotide
  source 1..25: mol_type = other DNA
ctcgcgccctccctcccgccctccc

SEQ ID NO: 32078 - DNA, 25 bp, synthetic construct
  misc_feature 1..25: note = Oligonucleotide
  source 1..25: mol_type = other DNA
gccctcgcgccctccctcccgccct

SEQ ID NO: 32079 - DNA, 25 bp, synthetic construct
  misc_feature 1..25: note = Oligonucleotide
  source 1..25: mol_type = other DNA
gcggccctcgcgccctccctcccgc

SEQ ID NO: 32080 - DNA, 25 bp, synthetic construct
  misc_feature 1..25: note = Oligonucleotide
  source 1..25: mol_type = other DNA
gtggcggccctcgcgccctccctcc

SEQ ID NO: 32081 - DNA, 25 bp, synthetic construct
  misc_feature 1..25: note = Oligonucleotide
  source 1..25: mol_type = other DNA
gtggtggcggccctcgcgccctccc

SEQ ID NO: 32082 - DNA, 25 bp, synthetic construct
  misc_feature 1..25: note = Oligonucleotide
  source 1..25: mol_type = other DNA
gcggtggtggcggccctcgcgccct

SEQ ID NO: 32083 - DNA, 25 bp, synthetic construct
  misc_feature 1..25: note = Oligonucleotide
  source 1..25: mol_type = other DNA
cgggcggtggtggcggccctcgcgc

SEQ ID NO: 32084 - DNA, 25 bp, synthetic construct
  misc_feature 1..25: note = Oligonucleotide
  source 1..25: mol_type = other DNA
ctgcgggcggtggtggcggccctcg

SEQ ID NO: 32085 - DNA, 25 bp, synthetic construct
  misc_feature 1..25: note = Oligonucleotide
  source 1..25: mol_type = other DNA
cctctgcgggcggtggtggcggccc

SEQ ID NO: 32086 - DNA, 25 bp, synthetic construct
  misc_feature 1..25: note = Oligonucleotide
  source 1..25: mol_type = other DNA
ctccctctgcgggcggtggtggcgg

SEQ ID NO: 32087 - DNA, 25 bp, synthetic construct
  misc_feature 1..25: note = Oligonucleotide
  source 1..25: mol_type = other DNA
ctcctccctctgcgggcggtggtgg

SEQ ID NO: 32088 - DNA, 25 bp, synthetic construct
  misc_feature 1..25: note = Oligonucleotide
  source 1..25: mol_type = other DNA
gggctcctccctctgcgggcggtgg

SEQ ID NO: 32089 - DNA, 25 bp, synthetic construct
  misc_feature 1..25: note = Oligonucleotide
  source 1..25: mol_type = other DNA
gccgggctcctccctctgcgggcgg

SEQ ID NO: 32090 - DNA, 25 bp, synthetic construct
  misc_feature 1..25: note = Oligonucleotide
  source 1..25: mol_type = other DNA
acggccgggctcctccctctgcggg

SEQ ID NO: 32091 - DNA, 25 bp, synthetic construct
  misc_feature 1..25: note = Oligonucleotide
  source 1..25: mol_type = other DNA
tccacggccgggctcctccctctgc

SEQ ID NO: 32092 - DNA, 25 bp, synthetic construct
  misc_feature 1..25: note = Oligonucleotide
  source 1..25: mol_type = other DNA
tcctccacggccgggctcctccctc

SEQ ID NO: 32093 - DNA, 25 bp, synthetic construct
  misc_feature 1..25: note = Oligonucleotide
  source 1..25: mol_type = other DNA
gcctcctccacggccgggctcctcc

SEQ ID NO: 32094 - DNA, 25 bp, synthetic construct
  misc_feature 1..25: note = Oligonucleotide
  source 1..25: mol_type = other DNA
cccgcctcctccacggccgggctcc

SEQ ID NO: 32095 - DNA, 25 bp, synthetic construct
  misc_feature 1..25: note = Oligonucleotide
  source 1..25: mol_type = other DNA
cgccccgcctcctccacggccgggc

SEQ ID NO: 32096 - DNA, 25 bp, synthetic construct
  misc_feature 1..25: note = Oligonucleotide
  source 1..25: mol_type = other DNA
ccgcgccccgcctcctccacggccg

SEQ ID NO: 32097 - DNA, 25 bp, synthetic construct
  misc_feature 1..25: note = Oligonucleotide
  source 1..25: mol_type = other DNA
gccccgcgccccgcctcctccacgg

SEQ ID NO: 32098 - DNA, 25 bp, synthetic construct
  misc_feature 1..25: note = Oligonucleotide
  source 1..25: mol_type = other DNA
gccgccccgcgccccgcctcctcca

SEQ ID NO: 32099 - DNA, 25 bp, synthetic construct
  misc_feature 1..25: note = Oligonucleotide
  source 1..25: mol_type = other DNA
gcggccgccccgcgccccgcctcct

SEQ ID NO: 32100 - DNA, 25 bp, synthetic construct
  misc_feature 1..25: note = Oligonucleotide
  source 1..25: mol_type = other DNA
gccgcggccgccccgcgccccgcct

SEQ ID NO: 32101 - DNA, 25 bp, synthetic construct
  misc_feature 1..25: note = Oligonucleotide
  source 1..25: mol_type = other DNA
catgccgcggccgccccgcgccccg

SEQ ID NO: 32102 - DNA, 25 bp, synthetic construct
  misc_feature 1..25: note = Oligonucleotide
  source 1..25: mol_type = other DNA
ctccatgccgcggccgccccgcgcc

SEQ ID NO: 32103 - DNA, 25 bp, synthetic construct
  misc_feature 1..25: note = Oligonucleotide
  source 1..25: mol_type = other DNA
tcgctccatgccgcggccgccccgc

SEQ ID NO: 32104 - DNA, 25 bp, synthetic construct
  misc_feature 1..25: note = Oligonucleotide
  source 1..25: mol_type = other DNA
ggctcgctccatgccgcggccgccc

SEQ ID NO: 32105 - DNA, 25 bp, synthetic construct
  misc_feature 1..25: note = Oligonucleotide
  source 1..25: mol_type = other DNA
ccaggctcgctccatgccgcggccg

SEQ ID NO: 32106 - DNA, 25 bp, synthetic construct
  misc_feature 1..25: note = Oligonucleotide
  source 1..25: mol_type = other DNA
gcgccaggctcgctccatgccgcgg

SEQ ID NO: 32107 - DNA, 25 bp, synthetic construct
  misc_feature 1..25: note = Oligonucleotide
  source 1..25: mol_type = other DNA
ggcgcgccaggctcgctccatgccg

SEQ ID NO: 32108 - DNA, 25 bp, synthetic construct
  misc_feature 1..25: note = Oligonucleotide
  source 1..25: mol_type = other DNA
ctgggcgcgccaggctcgctccatg

SEQ ID NO: 32109 - DNA, 25 bp, synthetic construct
  misc_feature 1..25: note = Oligonucleotide
  source 1..25: mol_type = other DNA
ctcctgggcgcgccaggctcgctcc

SEQ ID NO: 32110 - DNA, 25 bp, synthetic construct
  misc_feature 1..25: note = Oligonucleotide
  source 1..25: mol_type = other DNA
cagctcctgggcgcgccaggctcgc

SEQ ID NO: 32111 - DNA, 25 bp, synthetic construct
  misc_feature 1..25: note = Oligonucleotide
  source 1..25: mol_type = other DNA
atacagctcctgggcgcgccaggct

SEQ ID NO: 32112 - DNA, 25 bp, synthetic construct
  misc_feature 1..25: note = Oligonucleotide
  source 1..25: mol_type = other DNA
cgaatacagctcctgggcgcgccag

SEQ ID NO: 32113 - DNA, 25 bp, synthetic construct
  misc_feature 1..25: note = Oligonucleotide
  source 1..25: mol_type = other DNA
attcgaatacagctcctgggcgcgc

SEQ ID NO: 32114 - DNA, 25 bp, synthetic construct
  misc_feature 1..25: note = Oligonucleotide
  source 1..25: mol_type = other DNA
cgaattcgaatacagctcctgggcg

SEQ ID NO: 32115 - DNA, 25 bp, synthetic construct
  misc_feature 1..25: note = Oligonucleotide
  source 1..25: mol_type = other DNA
gctcgaattcgaatacagctcctgg

SEQ ID NO: 32116 - DNA, 25 bp, synthetic construct
  misc_feature 1..25: note = Oligonucleotide
  source 1..25: mol_type = other DNA
cgagctcgaattcgaatacagctcc

SEQ ID NO: 32117 - DNA, 25 bp, synthetic construct
  misc_feature 1..25: note = Oligonucleotide
  source 1..25: mol_type = other DNA
aaccgagctcgaattcgaatacagc

SEQ ID NO: 32118 - DNA, 25 bp, synthetic construct
  misc_feature 1..25: note = Oligonucleotide
  source 1..25: mol_type = other DNA
gggaaccgagctcgaattcgaatac

SEQ ID NO: 32119 - DNA, 25 bp, synthetic construct
  misc_feature 1..25: note = Oligonucleotide
  source 1..25: mol_type = other DNA
gcggggaaccgagctcgaattcgaa

SEQ ID NO: 32120 - DNA, 25 bp, synthetic construct
  misc_feature 1..25: note = Oligonucleotide
  source 1..25: mol_type = other DNA
ggcgcggggaaccgagctcgaattc

SEQ ID NO: 32121 - DNA, 25 bp, synthetic construct
  misc_feature 1..25: note = Oligonucleotide
  source 1..25: mol_type = other DNA
gggggcgcggggaaccgagctcgaa

SEQ ID NO: 32122 - DNA, 25 bp, synthetic construct
  misc_feature 1..25: note = Oligonucleotide
  source 1..25: mol_type = other DNA
gcagggggcgcggggaaccgagctc

SEQ ID NO: 32123 - DNA, 25 bp, synthetic construct
  misc_feature 1..25: note = Oligonucleotide
  source 1..25: mol_type = other DNA
ggcgcagggggcgcggggaaccgag

SEQ ID NO: 32124 - DNA, 25 bp, synthetic construct
  misc_feature 1..25: note = Oligonucleotide
  source 1..25: mol_type = other DNA
gggggcgcagggggcgcggggaacc

SEQ ID NO: 32125 - DNA, 25 bp, synthetic construct
  misc_feature 1..25: note = Oligonucleotide
  source 1..25: mol_type = other DNA
gcggggggcgcagggggcgcgggga

SEQ ID NO: 32126 - DNA, 25 bp, synthetic construct
  misc_feature 1..25: note = Oligonucleotide
  source 1..25: mol_type = other DNA
ggtgcggggggcgcagggggcgcgg

SEQ ID NO: 32127 - DNA, 25 bp, synthetic construct
  misc_feature 1..25: note = Oligonucleotide
  source 1..25: mol_type = other DNA
ggcggtgcggggggcgcagggggcg

SEQ ID NO: 32128 - DNA, 25 bp, synthetic construct
  misc_feature 1..25: note = Oligonucleotide
  source 1..25: mol_type = other DNA
ggcggcggtgcggggggcgcagggg

SEQ ID NO: 32129 - DNA, 25 bp, synthetic construct
  misc_feature 1..25: note = Oligonucleotide
  source 1..25: mol_type = other DNA
cggggcggcggtgcggggggcgcag

SEQ ID NO: 32130 - DNA, 25 bp, synthetic construct
  misc_feature 1..25: note = Oligonucleotide
  source 1..25: mol_type = other DNA
ccccggggcggcggtgcggggggcg

SEQ ID NO: 32131 - DNA, 25 bp, synthetic construct
  misc_feature 1..25: note = Oligonucleotide
  source 1..25: mol_type = other DNA
gggccccggggcggcggtgcggggg

SEQ ID NO: 32132 - DNA, 25 bp, synthetic construct
  misc_feature 1..25: note = Oligonucleotide
  source 1..25: mol_type = other DNA
ttcgggccccggggcggcggtgcgg

SEQ ID NO: 32133 - DNA, 25 bp, synthetic construct
  misc_feature 1..25: note = Oligonucleotide
  source 1..25: mol_type = other DNA
cgcttcgggccccggggcggcggtg

SEQ ID NO: 32134 - DNA, 25 bp, synthetic construct
  misc_feature 1..25: note = Oligonucleotide
  source 1..25: mol_type = other DNA
ttccgcttcgggccccggggcggcg

SEQ ID NO: 32135 - DNA, 25 bp, synthetic construct
  misc_feature 1..25: note = Oligonucleotide
  source 1..25: mol_type = other DNA
agtttccgcttcgggccccggggcg

SEQ ID NO: 32136 - DNA, 25 bp, synthetic construct
  misc_feature 1..25: note = Oligonucleotide
  source 1..25: mol_type = other DNA
taaagtttccgcttcgggccccggg

SEQ ID NO: 32137 - DNA, 25 bp, synthetic construct
  misc_feature 1..25: note = Oligonucleotide
  source 1..25: mol_type = other DNA
ctgtaaagtttccgcttcgggcccc

SEQ ID NO: 32138 - DNA, 25 bp, synthetic construct
  misc_feature 1..25: note = Oligonucleotide
  source 1..25: mol_type = other DNA
gcgctgtaaagtttccgcttcgggc

SEQ ID NO: 32139 - DNA, 25 bp, synthetic construct
  misc_feature 1..25: note = Oligonucleotide
  source 1..25: mol_type = other DNA
acggcgctgtaaagtttccgcttcg

SEQ ID NO: 32140 - DNA, 25 bp, synthetic construct
  misc_feature 1..25: note = Oligonucleotide
  source 1..25: mol_type = other DNA
gggacggcgctgtaaagtttccgct

SEQ ID NO: 32141 - DNA, 25 bp, synthetic construct
  misc_feature 1..25: note = Oligonucleotide
  source 1..25: mol_type = other DNA
ccggggacggcgctgtaaagtttcc

SEQ ID NO: 32142 - DNA, 25 bp, synthetic construct
  misc_feature 1..25: note = Oligonucleotide
  source 1..25: mol_type = other DNA
cggccggggacggcgctgtaaagtt

SEQ ID NO: 32143 - DNA, 25 bp, synthetic construct
  misc_feature 1..25: note = Oligonucleotide
  source 1..25: mol_type = other DNA
ttgcggccggggacggcgctgtaaa

SEQ ID NO: 32144 - DNA, 25 bp, synthetic construct
  misc_feature 1..25: note = Oligonucleotide
  source 1..25: mol_type = other DNA
aacttgcggccggggacggcgctgt

SEQ ID NO: 32145 - DNA, 25 bp, synthetic construct
  misc_feature 1..25: note = Oligonucleotide
  source 1..25: mol_type = other DNA
atgaacttgcggccggggacggcgc

SEQ ID NO: 32146 - DNA, 25 bp, synthetic construct
  misc_feature 1..25: note = Oligonucleotide
  source 1..25: mol_type = other DNA
gcgatgaacttgcggccggggacgg

SEQ ID NO: 32147 - DNA, 25 bp, synthetic construct
  misc_feature 1..25: note = Oligonucleotide
  source 1..25: mol_type = other DNA
acggcgatgaacttgcggccgggga

SEQ ID NO: 32148 - DNA, 25 bp, synthetic construct
  misc_feature 1..25: note = Oligonucleotide
  source 1..25: mol_type = other DNA
ttcacggcgatgaacttgcggccgg

SEQ ID NO: 32149 - DNA, 25 bp, synthetic construct
  misc_feature 1..25: note = Oligonucleotide
  source 1..25: mol_type = other DNA
gccttcacggcgatgaacttgcggc

SEQ ID NO: 32150 - DNA, 25 bp, synthetic construct
  misc_feature 1..25: note = Oligonucleotide
  source 1..25: mol_type = other DNA
tgcgccttcacggcgatgaacttgc

SEQ ID NO: 32151 - DNA, 25 bp, synthetic construct
  misc_feature 1..25: note = Oligonucleotide
  source 1..25: mol_type = other DNA
ctgtgcgccttcacggcgatgaact

SEQ ID NO: 32152 - DNA, 25 bp, synthetic construct
  misc_feature 1..25: note = Oligonucleotide
  source 1..25: mol_type = other DNA
gggctgtgcgccttcacggcgatga

SEQ ID NO: 32153 - DNA, 25 bp, synthetic construct
  misc_feature 1..25: note = Oligonucleotide
  source 1..25: mol_type = other DNA
tgcgggctgtgcgccttcacggcga

SEQ ID NO: 32154 - DNA, 25 bp, synthetic construct
  misc_feature 1..25: note = Oligonucleotide
  source 1..25: mol_type = other DNA
ccctgcgggctgtgcgccttcacgg

SEQ ID NO: 32155 - DNA, 25 bp, synthetic construct
  misc_feature 1..25: note = Oligonucleotide
  source 1..25: mol_type = other DNA
tcaccctgcgggctgtgcgccttca

SEQ ID NO: 32156 - DNA, 25 bp, synthetic construct
  misc_feature 1..25: note = Oligonucleotide
  source 1..25: mol_type = other DNA
ccttcaccctgcgggctgtgcgcct

SEQ ID NO: 32157 - DNA, 25 bp, synthetic construct
  misc_feature 1..25: note = Oligonucleotide
  source 1..25: mol_type = other DNA
tcgccttcaccctgcgggctgtgcg

SEQ ID NO: 32158 - DNA, 25 bp, synthetic construct
  misc_feature 1..25: note = Oligonucleotide
  source 1..25: mol_type = other DNA
atctcgccttcaccctgcgggctgt

SEQ ID NO: 32159 - DNA, 25 bp, synthetic construct
  misc_feature 1..25: note = Oligonucleotide
  source 1..25: mol_type = other DNA
gggatctcgccttcaccctgcgggc

SEQ ID NO: 32160 - DNA, 25 bp, synthetic construct
  misc_feature 1..25: note = Oligonucleotide
  source 1..25: mol_type = other DNA
agcgggatctcgccttcaccctgcg

SEQ ID NO: 32161 - DNA, 25 bp, synthetic construct
  misc_feature 1..25: note = Oligonucleotide
  source 1..25: mol_type = other DNA
tgcagcgggatctcgccttcaccct

SEQ ID NO: 32162 - DNA, 25 bp, synthetic construct
  misc_feature 1..25: note = Oligonucleotide
  source 1..25: mol_type = other DNA
cggtgcagcgggatctcgccttcac

SEQ ID NO: 32163 - DNA, 25 bp, synthetic construct
  misc_feature 1..25: note = Oligonucleotide
  source 1..25: mol_type = other DNA
ccgcggtgcagcgggatctcgcctt

SEQ ID NO: 32164 - DNA, 25 bp, synthetic construct
  misc_feature 1..25: note = Oligonucleotide
  source 1..25: mol_type = other DNA
tcgccgcggtgcagcgggatctcgc

SEQ ID NO: 32165 - DNA, 25 bp, synthetic construct
  misc_feature 1..25: note = Oligonucleotide
  source 1..25: mol_type = other DNA
gcctcgccgcggtgcagcgggatct

SEQ ID NO: 32166 - DNA, 25 bp, synthetic construct
  misc_feature 1..25: note = Oligonucleotide
  source 1..25: mol_type = other DNA
acggcctcgccgcggtgcagcggga

SEQ ID NO: 32167 - DNA, 25 bp, synthetic construct
  misc_feature 1..25: note = Oligonucleotide
  source 1..25: mol_type = other DNA
ttcacggcctcgccgcggtgcagcg

SEQ ID NO: 32168 - DNA, 25 bp, synthetic construct
  misc_feature 1..25: note = Oligonucleotide
  source 1..25: mol_type = other DNA
cccttcacggcctcgccgcggtgca

SEQ ID NO: 32169 - DNA, 25 bp, synthetic construct
  misc_feature 1..25: note = Oligonucleotide
  source 1..25: mol_type = other DNA
tcacccttcacggcctcgccgcggt

SEQ ID NO: 32170 - DNA, 25 bp, synthetic construct
  misc_feature 1..25: note = Oligonucleotide
  source 1..25: mol_type = other DNA
ccctcacccttcacggcctcgccgc

SEQ ID NO: 32171 - DNA, 25 bp, synthetic construct
  misc_feature 1..25: note = Oligonucleotide
  source 1..25: mol_type = other DNA
cgcccctcacccttcacggcctcgc

SEQ ID NO: 32172 - DNA, 25 bp, synthetic construct
  misc_feature 1..25: note = Oligonucleotide
  source 1..25: mol_type = other DNA
ccgcgcccctcacccttcacggcct

SEQ ID NO: 32173 - DNA, 25 bp, synthetic construct
  misc_feature 1..25: note = Oligonucleotide
  source 1..25: mol_type = other DNA
cccccgcgcccctcacccttcacgg

SEQ ID NO: 32174 - DNA, 25 bp, synthetic construct
  misc_feature 1..25: note = Oligonucleotide
  source 1..25: mol_type = other DNA
gcccccccgcgcccctcacccttca

SEQ ID NO: 32175 - DNA, 25 bp, synthetic construct
  misc_feature 1..25: note = Oligonucleotide
  source 1..25: mol_type = other DNA
cgcgcccccccgcgcccctcaccct

SEQ ID NO: 32176 - DNA, 25 bp, synthetic construct
  misc_feature 1..25: note = Oligonucleotide
  source 1..25: mol_type = other DNA
ccccgcgcccccccgcgcccctcac

SEQ ID NO: 32177 - DNA, 25 bp, synthetic construct
  misc_feature 1..25: note = Oligonucleotide
  source 1..25: mol_type = other DNA
cccccccgcgcccccccgcgcccct

SEQ ID NO: 32178 - DNA, 25 bp, synthetic construct
  misc_feature 1..25: note = Oligonucleotide
  source 1..25: mol_type = other DNA
ccgcccccccgcgcccccccgcgcc

SEQ ID NO: 32179 - DNA, 25 bp, synthetic construct
  misc_feature 1..25: note = Oligonucleotide
  source 1..25: mol_type = other DNA
ggcccgcccccccgcgcccccccgc

SEQ ID NO: 32180 - DNA, 25 bp, synthetic construct
  misc_feature 1..25: note = Oligonucleotide
  source 1..25: mol_type = other DNA
ccgggcccgcccccccgcgcccccc

SEQ ID NO: 32181 - DNA, 25 bp, synthetic construct
  misc_feature 1..25: note = Oligonucleotide
  source 1..25: mol_type = other DNA
gcgccgggcccgcccccccgcgccc

SEQ ID NO: 32182 - DNA, 25 bp, synthetic construct
  misc_feature 1..25: note = Oligonucleotide
  source 1..25: mol_type = other DNA
cccgcgccgggcccgcccccccgcg

SEQ ID NO: 32183 - DNA, 25 bp, synthetic construct
  misc_feature 1..25: note = Oligonucleotide
  source 1..25: mol_type = other DNA
ctccccgcgccgggcccgccccccc

SEQ ID NO: 32184 - DNA, 25 bp, synthetic construct
  misc_feature 1..25: note = Oligonucleotide
  source 1..25: mol_type = other DNA
cccctccccgcgccgggcccgcccc

SEQ ID NO: 32185 - DNA, 25 bp, synthetic construct
  misc_feature 1..25: note = Oligonucleotide
  source 1..25: mol_type = other DNA
cgccccctccccgcgccgggcccgc

SEQ ID NO: 32186 - DNA, 25 bp, synthetic construct
  misc_feature 1..25: note = Oligonucleotide
  source 1..25: mol_type = other DNA
cgccgccccctccccgcgccgggcc

SEQ ID NO: 32187 - DNA, 25 bp, synthetic construct
  misc_feature 1..25: note = Oligonucleotide
  source 1..25: mol_type = other DNA
cggcgccgccccctccccgcgccgg

SEQ ID NO: 32188 - DNA, 25 bp, synthetic construct
  misc_feature 1..25: note = Oligonucleotide
  source 1..25: mol_type = other DNA
gcgcggcgccgccccctccccgcgc

SEQ ID NO: 32189 - DNA, 25 bp, synthetic construct
  misc_feature 1..25: note = Oligonucleotide
  source 1..25: mol_type = other DNA
cgcgcgcggcgccgccccctccccg

SEQ ID NO: 32190 - DNA, 25 bp, synthetic construct
  misc_feature 1..25: note = Oligonucleotide
  source 1..25: mol_type = other DNA
caccgcgcgcggcgccgccccctcc

SEQ ID NO: 32191 - DNA, 25 bp, synthetic construct
  misc_feature 1..25: note = Oligonucleotide
  source 1..25: mol_type = other DNA
cagcaccgcgcgcggcgccgccccc

SEQ ID NO: 32192 - DNA, 25 bp, synthetic construct
  misc_feature 1..25: note = Oligonucleotide
  source 1..25: mol_type = other DNA
ggccagcaccgcgcgcggcgccgcc

SEQ ID NO: 32193 - DNA, 25 bp, synthetic construct
  misc_feature 1..25: note = Oligonucleotide
  source 1..25: mol_type = other DNA
cccggccagcaccgcgcgcggcgcc

SEQ ID NO: 32194 - DNA, 25 bp, synthetic construct
  misc_feature 1..25: note = Oligonucleotide
  source 1..25: mol_type = other DNA
cggcccggccagcaccgcgcgcggc

SEQ ID NO: 32195 - DNA, 25 bp, synthetic construct
  misc_feature 1..25: note = Oligonucleotide
  source 1..25: mol_type = other DNA
ccccggcccggccagcaccgcgcgc

SEQ ID NO: 32196 - DNA, 25 bp, synthetic construct
  misc_feature 1..25: note = Oligonucleotide
  source 1..25: mol_type = other DNA
ctgccccggcccggccagcaccgcg

SEQ ID NO: 32197 - DNA, 25 bp, synthetic construct
  misc_feature 1..25: note = Oligonucleotide
  source 1..25: mol_type = other DNA
ccactgccccggcccggccagcacc

SEQ ID NO: 32198 - DNA, 25 bp, synthetic construct
  misc_feature 1..25: note = Oligonucleotide
  source 1..25: mol_type = other DNA
gagccactgccccggcccggccagc

SEQ ID NO: 32199 - DNA, 25 bp, synthetic construct
  misc_feature 1..25: note = Oligonucleotide
  source 1..25: mol_type = other DNA
ccagagccactgccccggcccggcc

SEQ ID NO: 32200 - DNA, 25 bp, synthetic construct
  misc_feature 1..25: note = Oligonucleotide
  source 1..25: mol_type = other DNA
accccagagccactgccccggcccg

SEQ ID NO: 32201 - DNA, 25 bp, synthetic construct
  misc_feature 1..25: note = Oligonucleotide
  source 1..25: mol_type = other DNA
gagaccccagagccactgccccggc

SEQ ID NO: 32202 - DNA, 25 bp, synthetic construct
  misc_feature 1..25: note = Oligonucleotide
  source 1..25: mol_type = other DNA
gaggagaccccagagccactgcccc

SEQ ID NO: 32203 - DNA, 25 bp, synthetic construct
  misc_feature 1..25: note = Oligonucleotide
  source 1..25: mol_type = other DNA
gcagaggagaccccagagccactgc

SEQ ID NO: 32204 - DNA, 25 bp, synthetic construct
  misc_feature 1..25: note = Oligonucleotide
  source 1..25: mol_type = other DNA
ccggcagaggagaccccagagccac

SEQ ID NO: 32205 - DNA, 25 bp, synthetic construct
  misc_feature 1..25: note = Oligonucleotide
  source 1..25: mol_type = other DNA
gccccggcagaggagaccccagagc

SEQ ID NO: 32206 - DNA, 25 bp, synthetic construct
  misc_feature 1..25: note = Oligonucleotide
  source 1..25: mol_type = other DNA
gccgccccggcagaggagaccccag

SEQ ID NO: 32207 - DNA, 25 bp, synthetic construct
  misc_feature 1..25: note = Oligonucleotide
  source 1..25: mol_type = other DNA
agggccgccccggcagaggagaccc

SEQ ID NO: 32208 - DNA, 25 bp, synthetic construct
  misc_feature 1..25: note = Oligonucleotide
  source 1..25: mol_type = other DNA
cccagggccgccccggcagaggaga

SEQ ID NO: 32209 - DNA, 25 bp, synthetic construct
  misc_feature 1..25: note = Oligonucleotide
  source 1..25: mol_type = other DNA
gggcccagggccgccccggcagagg

SEQ ID NO: 32210 - DNA, 25 bp, synthetic construct
  misc_feature 1..25: note = Oligonucleotide
  source 1..25: mol_type = other DNA
caagggcccagggccgccccggcag

SEQ ID NO: 32211 - DNA, 25 bp, synthetic construct
  misc_feature 1..25: note = Oligonucleotide
  source 1..25: mol_type = other DNA
ccacaagggcccagggccgccccgg

SEQ ID NO: 32212 - DNA, 25 bp, synthetic construct
  misc_feature 1..25: note = Oligonucleotide
  source 1..25: mol_type = other DNA
atcccacaagggcccagggccgccc

SEQ ID NO: 32213 - DNA, 25 bp, synthetic construct
  misc_feature 1..25: note = Oligonucleotide
  source 1..25: mol_type = other DNA
gggatcccacaagggcccagggccg

SEQ ID NO: 32214 - DNA, 25 bp, synthetic construct
  misc_feature 1..25: note = Oligonucleotide
  source 1..25: mol_type = other DNA
ccagggatcccacaagggcccaggg

SEQ ID NO: 32215 - DNA, 25 bp, synthetic construct
  misc_feature 1..25: note = Oligonucleotide
  source 1..25: mol_type = other DNA
acaccagggatcccacaagggccca

SEQ ID NO: 32216 - DNA, 25 bp, synthetic construct
  misc_feature 1..25: note = Oligonucleotide
  source 1..25: mol_type = other DNA
gtgacaccagggatcccacaagggc

SEQ ID NO: 32217 - DNA, 25 bp, synthetic construct
  misc_feature 1..25: note = Oligonucleotide
  source 1..25: mol_type = other DNA
accgtgacaccagggatcccacaag

SEQ ID NO: 32218 - DNA, 25 bp, synthetic construct
  misc_feature 1..25: note = Oligonucleotide
  source 1..25: mol_type = other DNA
ttcaccgtgacaccagggatcccac

SEQ ID NO: 32219 - DNA, 25 bp, synthetic construct
  misc_feature 1..25: note = Oligonucleotide
  source 1..25: mol_type = other DNA
cccttcaccgtgacaccagggatcc

SEQ ID NO: 32220 - DNA, 25 bp, synthetic construct
  misc_feature 1..25: note = Oligonucleotide
  source 1..25: mol_type = other DNA
gagcccttcaccgtgacaccaggga

SEQ ID NO: 32221 - DNA, 25 bp, synthetic construct
  misc_feature 1..25: note = Oligonucleotide
  source 1..25: mol_type = other DNA
gcagagcccttcaccgtgacaccag

SEQ ID NO: 32222 - DNA, 25 bp, synthetic construct
  misc_feature 1..25: note = Oligonucleotide
  source 1..25: mol_type = other DNA
caggcagagcccttcaccgtgacac

SEQ ID NO: 32223 - DNA, 25 bp, synthetic construct
  misc_feature 1..25: note = Oligonucleotide
  source 1..25: mol_type = other DNA
ccccaggcagagcccttcaccgtga

SEQ ID NO: 32224 - DNA, 25 bp, synthetic construct
  misc_feature 1..25: note = Oligonucleotide
  source 1..25: mol_type = other DNA
cttccccaggcagagcccttcaccg

SEQ ID NO: 32225 - DNA, 25 bp, synthetic construct
  misc_feature 1..25: note = Oligonucleotide
  source 1..25: mol_type = other DNA
aaccttccccaggcagagcccttca

SEQ ID NO: 32226 - DNA, 25 bp, synthetic construct
  misc_feature 1..25: note = Oligonucleotide
  source 1..25: mol_type = other DNA
aggaaccttccccaggcagagccct

SEQ ID NO: 32227 - DNA, 25 bp, synthetic construct
  misc_feature 1..25: note = Oligonucleotide
  source 1..25: mol_type = other DNA
ggcaggaaccttccccaggcagagc

SEQ ID NO: 32228 - DNA, 25 bp, synthetic construct
  misc_feature 1..25: note = Oligonucleotide
  source 1..25: mol_type = other DNA
cacggcaggaaccttccccaggcag

SEQ ID NO: 32229 - DNA, 25 bp, synthetic construct
  misc_feature 1..25: note = Oligonucleotide
  source 1..25: mol_type = other DNA
ccgcacggcaggaaccttccccagg

SEQ ID NO: 32230 - DNA, 25 bp, synthetic construct
  misc_feature 1..25: note = Oligonucleotide
  source 1..25: mol_type = other DNA
gacccgcacggcaggaaccttcccc

SEQ ID NO: 32231 - DNA, 25 bp, synthetic construct
  misc_feature 1..25: note = Oligonucleotide
  source 1..25: mol_type = other DNA
agggacccgcacggcaggaaccttc

SEQ ID NO: 32232 - DNA, 25 bp, synthetic construct
  misc_feature 1..25: note = Oligonucleotide
  source 1..25: mol_type = other DNA
cggagggacccgcacggcaggaacc

SEQ ID NO: 32233 - DNA, 25 bp, synthetic construct
  misc_feature 1..25: note = Oligonucleotide
  source 1..25: mol_type = other DNA
caccggagggacccgcacggcagga

SEQ ID NO: 32234 - DNA, 25 bp, synthetic construct
  misc_feature 1..25: note = Oligonucleotide
  source 1..25: mol_type = other DNA
gagcaccggagggacccgcacggca

SEQ ID NO: 32235 - DNA, 25 bp, synthetic construct
  misc_feature 1..25: note = Oligonucleotide
  source 1..25: mol_type = other DNA
acagagcaccggagggacccgcacg

SEQ ID NO: 32236 - DNA, 25 bp, synthetic construct
  misc_feature 1..25: note = Oligonucleotide
  source 1..25: mol_type = other DNA
acgacagagcaccggagggacccgc

SEQ ID NO: 32237 - DNA, 25 bp, synthetic construct
  misc_feature 1..25: note = Oligonucleotide
  source 1..25: mol_type = other DNA
ggaacgacagagcaccggagggacc

SEQ ID NO: 32238 - DNA, 25 bp, synthetic construct
  misc_feature 1..25: note = Oligonucleotide
  source 1..25: mol_type = other DNA
cccggaacgacagagcaccggaggg

SEQ ID NO: 32239 - DNA, 25 bp, synthetic construct
  misc_feature 1..25: note = Oligonucleotide
  source 1..25: mol_type = other DNA
gagcccggaacgacagagcaccgga

SEQ ID NO: 32240 - DNA, 25 bp, synthetic construct
  misc_feature 1..25: note = Oligonucleotide
  source 1..25: mol_type = other DNA
agggagcccggaacgacagagcacc

SEQ ID NO: 32241 - DNA, 25 bp, synthetic construct
  misc_feature 1..25: note = Oligonucleotide
  source 1..25: mol_type = other DNA
cacagggagcccggaacgacagagc

SEQ ID NO: 32242 - DNA, 25 bp, synthetic construct
  misc_feature 1..25: note = Oligonucleotide
  source 1..25: mol_type = other DNA
tgacacagggagcccggaacgacag

SEQ ID NO: 32243 - DNA, 25 bp, synthetic construct
  misc_feature 1..25: note = Oligonucleotide
  source 1..25: mol_type = other DNA
tggtgacacagggagcccggaacga

SEQ ID NO: 32244 - DNA, 25 bp, synthetic construct
  misc_feature 1..25: note = Oligonucleotide
  source 1..25: mol_type = other DNA
ccgtggtgacacagggagcccggaa

SEQ ID NO: 32245 - DNA, 25 bp, synthetic construct
  misc_feature 1..25: note = Oligonucleotide
  source 1..25: mol_type = other DNA
cctccgtggtgacacagggagcccg

SEQ ID NO: 32246 - DNA, 25 bp, synthetic construct
  misc_feature 1..25: note = Oligonucleotide
  source 1..25: mol_type = other DNA
gagcctccgtggtgacacagggagc

SEQ ID NO: 32247 - DNA, 25 bp, synthetic construct
  misc_feature 1..25: note = Oligonucleotide
  source 1..25: mol_type = other DNA
gaggagcctccgtggtgacacaggg

SEQ ID NO: 32248 - DNA, 25 bp, synthetic construct
  misc_feature 1..25: note = Oligonucleotide
  source 1..25: mol_type = other DNA
agagaggagcctccgtggtgacaca

SEQ ID NO: 32249 - DNA, 25 bp, synthetic construct
  misc_feature 1..25: note = Oligonucleotide
  source 1..25: mol_type = other DNA
gcgagagaggagcctccgtggtgac

SEQ ID NO: 32250 - DNA, 25 bp, synthetic construct
  misc_feature 1..25: note = Oligonucleotide
  source 1..25: mol_type = other DNA
gtggcgagagaggagcctccgtggt

SEQ ID NO: 32251 - DNA, 25 bp, synthetic construct
  misc_feature 1..25: note = Oligonucleotide
  source 1..25: mol_type = other DNA
cccgtggcgagagaggagcctccgt

SEQ ID NO: 32252 - DNA, 25 bp, synthetic construct
  misc_feature 1..25: note = Oligonucleotide
  source 1..25: mol_type = other DNA
acgcccgtggcgagagaggagcctc

SEQ ID NO: 32253 - DNA, 25 bp, synthetic construct
  misc_feature 1..25: note = Oligonucleotide
  source 1..25: mol_type = other DNA
gaaacgcccgtggcgagagaggagc

SEQ ID NO: 32254 - DNA, 25 bp, synthetic construct
  misc_feature 1..25: note = Oligonucleotide
  source 1..25: mol_type = other DNA
acagaaacgcccgtggcgagagagg

SEQ ID NO: 32255 - DNA, 25 bp, synthetic construct
  misc_feature 1..25: note = Oligonucleotide
  source 1..25: mol_type = other DNA
gacacagaaacgcccgtggcgagag

SEQ ID NO: 32256 - DNA, 25 bp, synthetic construct
  misc_feature 1..25: note = Oligonucleotide
  source 1..25: mol_type = other DNA
ggggacacagaaacgcccgtggcga

SEQ ID NO: 32257 - DNA, 25 bp, synthetic construct
  misc_feature 1..25: note = Oligonucleotide
  source 1..25: mol_type = other DNA
cccggggacacagaaacgcccgtgg

SEQ ID NO: 32258 - DNA, 25 bp, synthetic construct
  misc_feature 1..25: note = Oligonucleotide
  source 1..25: mol_type = other DNA
acccccggggacacagaaacgcccg

SEQ ID NO: 32259 - DNA, 25 bp, synthetic construct
  misc_feature 1..25: note = Oligonucleotide
  source 1..25: mol_type = other DNA
gagacccccggggacacagaaacgc

SEQ ID NO: 32260 - DNA, 25 bp, synthetic construct
  misc_feature 1..25: note = Oligonucleotide
  source 1..25: mol_type = other DNA
gcagagacccccggggacacagaaa

SEQ ID NO: 32261 - DNA, 25 bp, synthetic construct
  misc_feature 1..25: note = Oligonucleotide
  source 1..25: mol_type = other DNA
caggcagagacccccggggacacag

SEQ ID NO: 32262 - DNA, 25 bp, synthetic construct
  misc_feature 1..25: note = Oligonucleotide
  source 1..25: mol_type = other DNA
cttcaggcagagacccccggggaca

SEQ ID NO: 32263 - DNA, 25 bp, synthetic construct
  misc_feature 1..25: note = Oligonucleotide
  source 1..25: mol_type = other DNA
gtccttcaggcagagacccccgggg

SEQ ID NO: 32264 - DNA, 25 bp, synthetic construct
  misc_feature 1..25: note = Oligonucleotide
  source 1..25: mol_type = other DNA
agggtccttcaggcagagacccccg

SEQ ID NO: 32265 - DNA, 25 bp, synthetic construct
  misc_feature 1..25: note = Oligonucleotide
  source 1..25: mol_type = other DNA
gacagggtccttcaggcagagaccc

SEQ ID NO: 32266 - DNA, 25 bp, synthetic construct
  misc_feature 1..25: note = Oligonucleotide
  source 1..25: mol_type = other DNA
tgggacagggtccttcaggcagaga

SEQ ID NO: 32267 - DNA, 25 bp, synthetic construct
  misc_feature 1..25: note = Oligonucleotide
  source 1..25: mol_type = other DNA
taatgggacagggtccttcaggcag

SEQ ID NO: 32268 - DNA, 25 bp, synthetic construct
  misc_feature 1..25: note = Oligonucleotide
  source 1..25: mol_type = other DNA
ctgtaatgggacagggtccttcagg

SEQ ID NO: 32269 - DNA, 25 bp, synthetic construct
  misc_feature 1..25: note = Oligonucleotide
  source 1..25: mol_type = other DNA
gctctgtaatgggacagggtccttc

SEQ ID NO: 32270 - DNA, 25 bp, synthetic construct
  misc_feature 1..25: note = Oligonucleotide
  source 1..25: mol_type = other DNA
gaagctctgtaatgggacagggtcc

SEQ ID NO: 32271 - DNA, 25 bp, synthetic construct
  misc_feature 1..25: note = Oligonucleotide
  source 1..25: mol_type = other DNA
aaggaagctctgtaatgggacaggg

SEQ ID NO: 32272 - DNA, 25 bp, synthetic construct
  misc_feature 1..25: note = Oligonucleotide
  source 1..25: mol_type = other DNA
tgcaaggaagctctgtaatgggaca

SEQ ID NO: 32273 - DNA, 25 bp, synthetic construct
  misc_feature 1..25: note = Oligonucleotide
  source 1..25: mol_type = other DNA
caatgcaaggaagctctgtaatggg

SEQ ID NO: 32274 - DNA, 25 bp, synthetic construct
  misc_feature 1..25: note = Oligonucleotide
  source 1..25: mol_type = other DNA
ccgcaatgcaaggaagctctgtaat

SEQ ID NO: 32275 - DNA, 25 bp, synthetic construct
  misc_feature 1..25: note = Oligonucleotide
  source 1..25: mol_type = other DNA
accccgcaatgcaaggaagctctgt

SEQ ID NO: 32276 - DNA, 25 bp, synthetic construct
  misc_feature 1..25: note = Oligonucleotide
  source 1..25: mol_type = other DNA
ggaaccccgcaatgcaaggaagctc

SEQ ID NO: 32277 - DNA, 25 bp, synthetic construct
  misc_feature 1..25: note = Oligonucleotide
  source 1..25: mol_type = other DNA
acgggaaccccgcaatgcaaggaag

SEQ ID NO: 32278 - DNA, 25 bp, synthetic construct
  misc_feature 1..25: note = Oligonucleotide
  source 1..25: mol_type = other DNA
gccacgggaaccccgcaatgcaagg

SEQ ID NO: 32279 - DNA, 25 bp, synthetic construct
  misc_feature 1..25: note = Oligonucleotide
  source 1..25: mol_type = other DNA
agtgccacgggaaccccgcaatgca

SEQ ID NO: 32280 - DNA, 25 bp, synthetic construct
  misc_feature 1..25: note = Oligonucleotide
  source 1..25: mol_type = other DNA
agaagtgccacgggaaccccgcaat

SEQ ID NO: 32281 - DNA, 25 bp, synthetic construct
  misc_feature 1..25: note = Oligonucleotide
  source 1..25: mol_type = other DNA
tgcagaagtgccacgggaaccccgc

SEQ ID NO: 32282 - DNA, 25 bp, synthetic construct
  misc_feature 1..25: note = Oligonucleotide
  source 1..25: mol_type = other DNA
agctgcagaagtgccacgggaaccc

SEQ ID NO: 32283 - DNA, 25 bp, synthetic construct
  misc_feature 1..25: note = Oligonucleotide
  source 1..25: mol_type = other DNA
agaagctgcagaagtgccacgggaa

SEQ ID NO: 32284 - DNA, 25 bp, synthetic construct
  misc_feature 1..25: note = Oligonucleotide
  source 1..25: mol_type = other DNA
tggagaagctgcagaagtgccacgg

SEQ ID NO: 32285 - DNA, 25 bp, synthetic construct
  misc_feature 1..25: note = Oligonucleotide
  source 1..25: mol_type = other DNA
caatggagaagctgcagaagtgcca

SEQ ID NO: 32286 - DNA, 25 bp, synthetic construct
  misc_feature 1..25: note = Oligonucleotide
  source 1..25: mol_type = other DNA
ctccaatggagaagctgcagaagtg

SEQ ID NO: 32287 - DNA, 25 bp, synthetic construct
  misc_feature 1..25: note = Oligonucleotide
  source 1..25: mol_type = other DNA
ggcctccaatggagaagctgcagaa

SEQ ID NO: 32288 - DNA, 25 bp, synthetic construct
  misc_feature 1..25: note = Oligonucleotide
  source 1..25: mol_type = other DNA
aggggcctccaatggagaagctgca

SEQ ID NO: 32289 - DNA, 25 bp, synthetic construct
  misc_feature 1..25: note = Oligonucleotide
  source 1..25: mol_type = other DNA
cgcaggggcctccaatggagaagct

SEQ ID NO: 32290 - DNA, 25 bp, synthetic construct
  misc_feature 1..25: note = Oligonucleotide
  source 1..25: mol_type = other DNA
catcgcaggggcctccaatggagaa

SEQ ID NO: 32291 - DNA, 25 bp, synthetic construct
  misc_feature 1..25: note = Oligonucleotide
  source 1..25: mol_type = other DNA
ccacatcgcaggggcctccaatgga

SEQ ID NO: 32292 - DNA, 25 bp, synthetic construct
  misc_feature 1..25: note = Oligonucleotide
  source 1..25: mol_type = other DNA
cccccacatcgcaggggcctccaat

SEQ ID NO: 32293 - DNA, 25 bp, synthetic construct
  misc_feature 1..25: note = Oligonucleotide
  source 1..25: mol_type = other DNA
ggtcccccacatcgcaggggcctcc

SEQ ID NO: 32294 - DNA, 25 bp, synthetic construct
  misc_feature 1..25: note = Oligonucleotide
  source 1..25: mol_type = other DNA
aagggtcccccacatcgcaggggcc

SEQ ID NO: 32295 - DNA, 25 bp, synthetic construct
  misc_feature 1..25: note = Oligonucleotide
  source 1..25: mol_type = other DNA
ggcaagggtcccccacatcgcaggg

SEQ ID NO: 32296 - DNA, 25 bp, synthetic construct
  misc_feature 1..25: note = Oligonucleotide
  source 1..25: mol_type = other DNA
gacggcaagggtcccccacatcgca

SEQ ID NO: 32297 - DNA, 25 bp, synthetic construct
  misc_feature 1..25: note = Oligonucleotide
  source 1..25: mol_type = other DNA
cacgacggcaagggtcccccacatc

SEQ ID NO: 32298 - DNA, 25 bp, synthetic construct
  misc_feature 1..25: note = Oligonucleotide
  source 1..25: mol_type = other DNA
ccccacgacggcaagggtcccccac

SEQ ID NO: 32299 - DNA, 25 bp, synthetic construct
  misc_feature 1..25: note = Oligonucleotide
  source 1..25: mol_type = other DNA
acaccccacgacggcaagggtcccc

SEQ ID NO: 32300 - DNA, 25 bp, synthetic construct
  misc_feature 1..25: note = Oligonucleotide
  source 1..25: mol_type = other DNA
cagacaccccacgacggcaagggtc

SEQ ID NO: 32301 - DNA, 25 bp, synthetic construct
  misc_feature 1..25: note = Oligonucleotide
  source 1..25: mol_type = other DNA
tcacagacaccccacgacggcaagg

SEQ ID NO: 32302 - DNA, 25 bp, synthetic construct
  misc_feature 1..25: note = Oligonucleotide
  source 1..25: mol_type = other DNA
cggtcacagacaccccacgacggca

SEQ ID NO: 32303 - DNA, 25 bp, synthetic construct
  misc_feature 1..25: note = Oligonucleotide
  source 1..25: mol_type = other DNA
tgacggtcacagacaccccacgacg

SEQ ID NO: 32304 - DNA, 25 bp, synthetic construct
  misc_feature 1..25: note = Oligonucleotide
  source 1..25: mol_type = other DNA
acatgacggtcacagacaccccacg

SEQ ID NO: 32305 - DNA, 25 bp, synthetic construct
  misc_feature 1..25: note = Oligonucleotide
  source 1..25: mol_type = other DNA
cccacatgacggtcacagacacccc

SEQ ID NO: 32306 - DNA, 25 bp, synthetic construct
  misc_feature 1..25: note = Oligonucleotide
  source 1..25: mol_type = other DNA
acacccacatgacggtcacagacac

SEQ ID NO: 32307 - DNA, 25 bp, synthetic construct
  misc_feature 1..25: note = Oligonucleotide
  source 1..25: mol_type = other DNA
caaacacccacatgacggtcacaga

SEQ ID NO: 32308 - DNA, 25 bp, synthetic construct
  misc_feature 1..25: note = Oligonucleotide
  source 1..25: mol_type = other DNA
acacaaacacccacatgacggtcac

SEQ ID NO: 32309 - DNA, 25 bp, synthetic construct
  misc_feature 1..25: note = Oligonucleotide
  source 1..25: mol_type = other DNA
ataacacaaacacccacatgacggt

SEQ ID NO: 32310 - DNA, 25 bp, synthetic construct
  misc_feature 1..25: note = Oligonucleotide
  source 1..25: mol_type = other DNA
tgcataacacaaacacccacatgac

SEQ ID NO: 32311 - DNA, 25 bp, synthetic construct
  misc_feature 1..25: note = Oligonucleotide
  source 1..25: mol_type = other DNA
gcctgcataacacaaacacccacat

SEQ ID NO: 32312 - DNA, 25 bp, synthetic construct
  misc_feature 1..25: note = Oligonucleotide
  source 1..25: mol_type = other DNA
gaagcctgcataacacaaacaccca

SEQ ID NO: 32313 - DNA, 25 bp, synthetic construct
  misc_feature 1..25: note = Oligonucleotide
  source 1..25: mol_type = other DNA
acagaagcctgcataacacaaacac

SEQ ID NO: 32314 - DNA, 25 bp, synthetic construct
  misc_feature 1..25: note = Oligonucleotide
  source 1..25: mol_type = other DNA
gtgacagaagcctgcataacacaaa

SEQ ID NO: 32315 - DNA, 25 bp, synthetic construct
  misc_feature 1..25: note = Oligonucleotide
  source 1..25: mol_type = other DNA
ccggtgacagaagcctgcataacac

SEQ ID NO: 32316 - DNA, 25 bp, synthetic construct
  misc_feature 1..25: note = Oligonucleotide
  source 1..25: mol_type = other DNA
gccccggtgacagaagcctgcataa

SEQ ID NO: 32317 - DNA, 25 bp, synthetic construct
  misc_feature 1..25: note = Oligonucleotide
  source 1..25: mol_type = other DNA
gaagccccggtgacagaagcctgca

SEQ ID NO: 32318 - DNA, 25 bp, synthetic construct
  misc_feature 1..25: note = Oligonucleotide
  source 1..25: mol_type = other DNA
caggaagccccggtgacagaagcct

SEQ ID NO: 32319 - DNA, 25 bp, synthetic construct
  misc_feature 1..25: note = Oligonucleotide
  source 1..25: mol_type = other DNA
acacaggaagccccggtgacagaag

SEQ ID NO: 32320 - DNA, 25 bp, synthetic construct
  misc_feature 1..25: note = Oligonucleotide
  source 1..25: mol_type = other DNA
agaacacaggaagccccggtgacag

SEQ ID NO: 32321 - DNA, 25 bp, synthetic construct
  misc_feature 1..25: note = Oligonucleotide
  source 1..25: mol_type = other DNA
cccagaacacaggaagccccggtga

SEQ ID NO: 32322 - DNA, 25 bp, synthetic construct
  misc_feature 1..25: note = Oligonucleotide
  source 1..25: mol_type = other DNA
ccccccagaacacaggaagccccgg

SEQ ID NO: 32323 - DNA, 25 bp, synthetic construct
  misc_feature 1..25: note = Oligonucleotide
  source 1..25: mol_type = other DNA
gatccccccagaacacaggaagccc

SEQ ID NO: 32324 - DNA, 25 bp, synthetic construct
  misc_feature 1..25: note = Oligonucleotide
  source 1..25: mol_type = other DNA
cgcgatccccccagaacacaggaag

SEQ ID NO: 32325 - DNA, 25 bp, synthetic construct
  misc_feature 1..25: note = Oligonucleotide
  source 1..25: mol_type = other DNA
gcacgcgatccccccagaacacagg

SEQ ID NO: 32326 - DNA, 25 bp, synthetic construct
  misc_feature 1..25: note = Oligonucleotide
  source 1..25: mol_type = other DNA
atggcacgcgatccccccagaacac

SEQ ID NO: 32327 - DNA, 25 bp, synthetic construct
  misc_feature 1..25: note = Oligonucleotide
  source 1..25: mol_type = other DNA
gtcatggcacgcgatccccccagaa

SEQ ID NO: 32328 - DNA, 25 bp, synthetic construct
  misc_feature 1..25: note = Oligonucleotide
  source 1..25: mol_type = other DNA
tttgtcatggcacgcgatcccccca

SEQ ID NO: 32329 - DNA, 25 bp, synthetic construct
  misc_feature 1..25: note = Oligonucleotide
  source 1..25: mol_type = other DNA
gggtttgtcatggcacgcgatcccc

SEQ ID NO: 32330 - DNA, 25 bp, synthetic construct
  misc_feature 1..25: note = Oligonucleotide
  source 1..25: mol_type = other DNA
gaggggtttgtcatggcacgcgatc

SEQ ID NO: 32331 - DNA, 25 bp, synthetic construct
  misc_feature 1..25: note = Oligonucleotide
  source 1..25: mol_type = other DNA
tgagaggggtttgtcatggcacgcg

SEQ ID NO: 32332 - DNA, 25 bp, synthetic construct
  misc_feature 1..25: note = Oligonucleotide
  source 1..25: mol_type = other DNA
gaatgagaggggtttgtcatggcac

SEQ ID NO: 32333 - DNA, 25 bp, synthetic construct
  misc_feature 1..25: note = Oligonucleotide
  source 1..25: mol_type = other DNA
ccagaatgagaggggtttgtcatgg

SEQ ID NO: 32334 - DNA, 25 bp, synthetic construct
  misc_feature 1..25: note = Oligonucleotide
  source 1..25: mol_type = other DNA
cccccagaatgagaggggtttgtca

SEQ ID NO: 32335 - DNA, 25 bp, synthetic construct
  misc_feature 1..25: note = Oligonucleotide
  source 1..25: mol_type = other DNA
agacccccagaatgagaggggtttg

SEQ ID NO: 32336 - DNA, 25 bp, synthetic construct
  misc_feature 1..25: note = Oligonucleotide
  source 1..25: mol_type = other DNA
ccgagacccccagaatgagaggggt

SEQ ID NO: 32337 - DNA, 25 bp, synthetic construct
  misc_feature 1..25: note = Oligonucleotide
  source 1..25: mol_type = other DNA
gccccgagacccccagaatgagagg

SEQ ID NO: 32338 - DNA, 25 bp, synthetic construct
  misc_feature 1..25: note = Oligonucleotide
  source 1..25: mol_type = other DNA
atggccccgagacccccagaatgag

SEQ ID NO: 32339 - DNA, 25 bp, synthetic construct
  misc_feature 1..25: note = Oligonucleotide
  source 1..25: mol_type = other DNA
gtgatggccccgagacccccagaat

SEQ ID NO: 32340 - DNA, 25 bp, synthetic construct
  misc_feature 1..25: note = Oligonucleotide
  source 1..25: mol_type = other DNA
ccagtgatggccccgagacccccag

SEQ ID NO: 32341 - DNA, 25 bp, synthetic construct
  misc_feature 1..25: note = Oligonucleotide
  source 1..25: mol_type = other DNA
agcccagtgatggccccgagacccc

SEQ ID NO: 32342 - DNA, 25 bp, synthetic construct
  misc_feature 1..25: note = Oligonucleotide
  source 1..25: mol_type = other DNA
aggagcccagtgatggccccgagac

SEQ ID NO: 32343 - DNA, 25 bp, synthetic construct
  misc_feature 1..25: note = Oligonucleotide
  source 1..25: mol_type = other DNA
gctaggagcccagtgatggccccga

SEQ ID NO: 32344 - DNA, 25 bp, synthetic construct
  misc_feature 1..25: note = Oligonucleotide
  source 1..25: mol_type = other DNA
gaggctaggagcccagtgatggccc

SEQ ID NO: 32345 - DNA, 25 bp, synthetic construct
  misc_feature 1..25: note = Oligonucleotide
  source 1..25: mol_type = other DNA
cctgaggctaggagcccagtgatgg

SEQ ID NO: 32346 - DNA, 25 bp, synthetic construct
  misc_feature 1..25: note = Oligonucleotide
  source 1..25: mol_type = other DNA
ggccctgaggctaggagcccagtga

SEQ ID NO: 32347 - DNA, 25 bp, synthetic construct
  misc_feature 1..25: note = Oligonucleotide
  source 1..25: mol_type = other DNA
gccggccctgaggctaggagcccag

SEQ ID NO: 32348 - DNA, 25 bp, synthetic construct
  misc_feature 1..25: note = Oligonucleotide
  source 1..25: mol_type = other DNA
tcagccggccctgaggctaggagcc

SEQ ID NO: 32349 - DNA, 25 bp, synthetic construct
  misc_feature 1..25: note = Oligonucleotide
  source 1..25: mol_type = other DNA
acctcagccggccctgaggctagga

SEQ ID NO: 32350 - DNA, 25 bp, synthetic construct
  misc_feature 1..25: note = Oligonucleotide
  source 1..25: mol_type = other DNA
tccacctcagccggccctgaggcta

SEQ ID NO: 32351 - DNA, 25 bp, synthetic construct
  misc_feature 1..25: note = Oligonucleotide
  source 1..25: mol_type = other DNA
gtttccacctcagccggccctgagg

SEQ ID NO: 32352 - DNA, 25 bp, synthetic construct
  misc_feature 1..25: note = Oligonucleotide
  source 1..25: mol_type = other DNA
gctgtttccacctcagccggccctg

SEQ ID NO: 32353 - DNA, 25 bp, synthetic construct
  misc_feature 1..25: note = Oligonucleotide
  source 1..25: mol_type = other DNA
tgggctgtttccacctcagccggcc

SEQ ID NO: 32354 - DNA, 25 bp, synthetic construct
  misc_feature 1..25: note = Oligonucleotide
  source 1..25: mol_type = other DNA
agctgggctgtttccacctcagccg

SEQ ID NO: 32355 - DNA, 25 bp, synthetic construct
  misc_feature 1..25: note = Oligonucleotide
  source 1..25: mol_type = other DNA
accagctgggctgtttccacctcag

SEQ ID NO: 32356 - DNA, 25 bp, synthetic construct
  misc_feature 1..25: note = Oligonucleotide
  source 1..25: mol_type = other DNA
tgcaccagctgggctgtttccacct

SEQ ID NO: 32357 - DNA, 25 bp, synthetic construct
  misc_feature 1..25: note = Oligonucleotide
  source 1..25: mol_type = other DNA
tgatgcaccagctgggctgtttcca

SEQ ID NO: 32358 - DNA, 25 bp, synthetic construct
  misc_feature 1..25: note = Oligonucleotide
  source 1..25: mol_type = other DNA
acgtgatgcaccagctgggctgttt

SEQ ID NO: 32359 - DNA, 25 bp, synthetic construct
  misc_feature 1..25: note = Oligonucleotide
  source 1..25: mol_type = other DNA
gccacgtgatgcaccagctgggctg

SEQ ID NO: 32360 - DNA, 25 bp, synthetic construct
  misc_feature 1..25: note = Oligonucleotide
  source 1..25: mol_type = other DNA
gaggccacgtgatgcaccagctggg

SEQ ID NO: 32361 - DNA, 25 bp, synthetic construct
  misc_feature 1..25: note = Oligonucleotide
  source 1..25: mol_type = other DNA
ggtgaggccacgtgatgcaccagct

SEQ ID NO: 32362 - DNA, 25 bp, synthetic construct
  misc_feature 1..25: note = Oligonucleotide
  source 1..25: mol_type = other DNA
gtgggtgaggccacgtgatgcacca

SEQ ID NO: 32363 - DNA, 25 bp, synthetic construct
  misc_feature 1..25: note = Oligonucleotide
  source 1..25: mol_type = other DNA
ccagtgggtgaggccacgtgatgca

SEQ ID NO: 32364 - DNA, 25 bp, synthetic construct
  misc_feature 1..25: note = Oligonucleotide
  source 1..25: mol_type = other DNA
tggccagtgggtgaggccacgtgat

SEQ ID NO: 32365 - DNA, 25 bp, synthetic construct
  misc_feature 1..25: note = Oligonucleotide
  source 1..25: mol_type = other DNA
ctgtggccagtgggtgaggccacgt

SEQ ID NO: 32366 - DNA, 25 bp, synthetic construct
  misc_feature 1..25: note = Oligonucleotide
  source 1..25: mol_type = other DNA
gtgctgtggccagtgggtgaggcca

SEQ ID NO: 32367 - DNA, 25 bp, synthetic construct
  misc_feature 1..25: note = Oligonucleotide
  source 1..25: mol_type = other DNA
atcgtgctgtggccagtgggtgagg

SEQ ID NO: 32368 - DNA, 25 bp, synthetic construct
  misc_feature 1..25: note = Oligonucleotide
  source 1..25: mol_type = other DNA
gtcatcgtgctgtggccagtgggtg

SEQ ID NO: 32369 - DNA, 25 bp, synthetic construct
  misc_feature 1..25: note = Oligonucleotide
  source 1..25: mol_type = other DNA
ggggtcatcgtgctgtggccagtgg

SEQ ID NO: 32370 - DNA, 25 bp, synthetic construct
  misc_feature 1..25: note = Oligonucleotide
  source 1..25: mol_type = other DNA
ctcggggtcatcgtgctgtggccag

SEQ ID NO: 32371 - DNA, 25 bp, synthetic construct
  misc_feature 1..25: note = Oligonucleotide
  source 1..25: mol_type = other DNA
gagctcggggtcatcgtgctgtggc

SEQ ID NO: 32372 - DNA, 25 bp, synthetic construct
  misc_feature 1..25: note = Oligonucleotide
  source 1..25: mol_type = other DNA
cgagagctcggggtcatcgtgctgt

SEQ ID NO: 32373 - DNA, 25 bp, synthetic construct
  misc_feature 1..25: note = Oligonucleotide
  source 1..25: mol_type = other DNA
tgccgagagctcggggtcatcgtgc

SEQ ID NO: 32374 - DNA, 25 bp, synthetic construct
  misc_feature 1..25: note = Oligonucleotide
  source 1..25: mol_type = other DNA
cactgccgagagctcggggtcatcg

SEQ ID NO: 32375 - DNA, 25 bp, synthetic construct
  misc_feature 1..25: note = Oligonucleotide
  source 1..25: mol_type = other DNA
ggtcactgccgagagctcggggtca

SEQ ID NO: 32376 - DNA, 25 bp, synthetic construct
  misc_feature 1..25: note = Oligonucleotide
  source 1..25: mol_type = other DNA
aggggtcactgccgagagctcgggg

SEQ ID NO: 32377 - DNA, 25 bp, synthetic construct
  misc_feature 1..25: note = Oligonucleotide
  source 1..25: mol_type = other DNA
cccaggggtcactgccgagagctcg

SEQ ID NO: 32378 - DNA, 25 bp, synthetic construct
  misc_feature 1..25: note = Oligonucleotide
  source 1..25: mol_type = other DNA
ccacccaggggtcactgccgagagc

SEQ ID NO: 32379 - DNA, 25 bp, synthetic construct
  misc_feature 1..25: note = Oligonucleotide
  source 1..25: mol_type = other DNA
cacccacccaggggtcactgccgag

SEQ ID NO: 32380 - DNA, 25 bp, synthetic construct
  misc_feature 1..25: note = Oligonucleotide
  source 1..25: mol_type = other DNA
tgtcacccacccaggggtcactgcc

SEQ ID NO: 32381 - DNA, 25 bp, synthetic construct
  misc_feature 1..25: note = Oligonucleotide
  source 1..25: mol_type = other DNA
ctctgtcacccacccaggggtcact

SEQ ID NO: 32382 - DNA, 25 bp, synthetic construct
  misc_feature 1..25: note = Oligonucleotide
  source 1..25: mol_type = other DNA
tggctctgtcacccacccaggggtc

SEQ ID NO: 32383 - DNA, 25 bp, synthetic construct
  misc_feature 1..25: note = Oligonucleotide
  source 1..25: mol_type = other DNA
tcctggctctgtcacccacccaggg

SEQ ID NO: 32384 - DNA, 25 bp, synthetic construct
  misc_feature 1..25: note = Oligonucleotide
  source 1..25: mol_type = other DNA
ccatcctggctctgtcacccaccca

SEQ ID NO: 32385 - DNA, 25 bp, synthetic construct
  misc_feature 1..25: note = Oligonucleotide
  source 1..25: mol_type = other DNA
cccccatcctggctctgtcacccac

SEQ ID NO: 32386 - DNA, 25 bp, synthetic construct
  misc_feature 1..25: note = Oligonucleotide
  source 1..25: mol_type = other DNA
cgacccccatcctggctctgtcacc

SEQ ID NO: 32387 - DNA, 25 bp, synthetic construct
  misc_feature 1..25: note = Oligonucleotide
  source 1..25: mol_type = other DNA
aaccgacccccatcctggctctgtc

SEQ ID NO: 32388 - DNA, 25 bp, synthetic construct
  misc_feature 1..25: note = Oligonucleotide
  source 1..25: mol_type = other DNA
ttcaaccgacccccatcctggctct

SEQ ID NO: 32389 - DNA, 25 bp, synthetic construct
  misc_feature 1..25: note = Oligonucleotide
  source 1..25: mol_type = other DNA
cccttcaaccgacccccatcctggc

SEQ ID NO: 32390 - DNA, 25 bp, synthetic construct
  misc_feature 1..25: note = Oligonucleotide
  source 1..25: mol_type = other DNA
agccccttcaaccgacccccatcct

SEQ ID NO: 32391 - DNA, 25 bp, synthetic construct
  misc_feature 1..25: note = Oligonucleotide
  source 1..25: mol_type = other DNA
cccagccccttcaaccgacccccat

SEQ ID NO: 32392 - DNA, 25 bp, synthetic construct
  misc_feature 1..25: note = Oligonucleotide
  source 1..25: mol_type = other DNA
tcccccagccccttcaaccgacccc

SEQ ID NO: 32393 - DNA, 25 bp, synthetic construct
  misc_feature 1..25: note = Oligonucleotide
  source 1..25: mol_type = other DNA
tgctcccccagccccttcaaccgac

SEQ ID NO: 32394 - DNA, 25 bp, synthetic construct
  misc_feature 1..25: note = Oligonucleotide
  source 1..25: mol_type = other DNA
ccatgctcccccagccccttcaacc

SEQ ID NO: 32395 - DNA, 25 bp, synthetic construct
  misc_feature 1..25: note = Oligonucleotide
  source 1..25: mol_type = other DNA
tgaccatgctcccccagccccttca

SEQ ID NO: 32396 - DNA, 25 bp, synthetic construct
  misc_feature 1..25: note = Oligonucleotide
  source 1..25: mol_type = other DNA
agctgaccatgctcccccagcccct

SEQ ID NO: 32397 - DNA, 25 bp, synthetic construct
  misc_feature 1..25: note = Oligonucleotide
  source 1..25: mol_type = other DNA
cccagctgaccatgctcccccagcc

SEQ ID NO: 32398 - DNA, 25 bp, synthetic construct
  misc_feature 1..25: note = Oligonucleotide
  source 1..25: mol_type = other DNA
acccccagctgaccatgctccccca

SEQ ID NO: 32399 - DNA, 25 bp, synthetic construct
  misc_feature 1..25: note = Oligonucleotide
  source 1..25: mol_type = other DNA
cccacccccagctgaccatgctccc

SEQ ID NO: 32400 - DNA, 25 bp, synthetic construct
  misc_feature 1..25: note = Oligonucleotide
  source 1..25: mol_type = other DNA
gcccccacccccagctgaccatgct

SEQ ID NO: 32401 - DNA, 25 bp, synthetic construct
  misc_feature 1..25: note = Oligonucleotide
  source 1..25: mol_type = other DNA
gctgcccccacccccagctgaccat

SEQ ID NO: 32402 - DNA, 25 bp, synthetic construct
  misc_feature 1..25: note = Oligonucleotide
  source 1..25: mol_type = other DNA
gctgctgcccccacccccagctgac

SEQ ID NO: 32403 - DNA, 25 bp, synthetic construct
  misc_feature 1..25: note = Oligonucleotide
  source 1..25: mol_type = other DNA
cctgctgctgcccccacccccagct

SEQ ID NO: 32404 - DNA, 25 bp, synthetic construct
  misc_feature 1..25: note = Oligonucleotide
  source 1..25: mol_type = other DNA
actcctgctgctgcccccaccccca

SEQ ID NO: 32405 - DNA, 25 bp, synthetic construct
  misc_feature 1..25: note = Oligonucleotide
  source 1..25: mol_type = other DNA
cacactcctgctgctgcccccaccc

SEQ ID NO: 32406 - DNA, 25 bp, synthetic construct
  misc_feature 1..25: note = Oligonucleotide
  source 1..25: mol_type = other DNA
ggccacactcctgctgctgccccca

SEQ ID NO: 32407 - DNA, 25 bp, synthetic construct
  misc_feature 1..25: note = Oligonucleotide
  source 1..25: mol_type = other DNA
aggggccacactcctgctgctgccc

SEQ ID NO: 32408 - DNA, 25 bp, synthetic construct
  misc_feature 1..25: note = Oligonucleotide
  source 1..25: mol_type = other DNA
ggcaggggccacactcctgctgctg

SEQ ID NO: 32409 - DNA, 25 bp, synthetic construct
  misc_feature 1..25: note = Oligonucleotide
  source 1..25: mol_type = other DNA
aggggcaggggccacactcctgctg

SEQ ID NO: 32410 - DNA, 25 bp, synthetic construct
  misc_feature 1..25: note = Oligonucleotide
  source 1..25: mol_type = other DNA
ggcaggggcaggggccacactcctg

SEQ ID NO: 32411 - DNA, 25 bp, synthetic construct
  misc_feature 1..25: note = Oligonucleotide
  source 1..25: mol_type = other DNA
gcaggcaggggcaggggccacactc

SEQ ID NO: 32412 - DNA, 25 bp, synthetic construct
  misc_feature 1..25: note = Oligonucleotide
  source 1..25: mol_type = other DNA
ggcgcaggcaggggcaggggccaca

SEQ ID NO: 32413 - DNA, 25 bp, synthetic construct
  misc_feature 1..25: note = Oligonucleotide
  source 1..25: mol_type = other DNA
aggggcgcaggcaggggcaggggcc

SEQ ID NO: 32414 - DNA, 25 bp, synthetic construct
  misc_feature 1..25: note = Oligonucleotide
  source 1..25: mol_type = other DNA
gggaggggcgcaggcaggggcaggg

SEQ ID NO: 32415 - DNA, 25 bp, synthetic construct
  misc_feature 1..25: note = Oligonucleotide
  source 1..25: mol_type = other DNA
tcggggaggggcgcaggcaggggca

SEQ ID NO: 32416 - DNA, 25 bp, synthetic construct
  misc_feature 1..25: note = Oligonucleotide
  source 1..25: mol_type = other DNA
cactcggggaggggcgcaggcaggg

SEQ ID NO: 32417 - DNA, 25 bp, synthetic construct
  misc_feature 1..25: note = Oligonucleotide
  source 1..25: mol_type = other DNA
acacactcggggaggggcgcaggca

SEQ ID NO: 32418 - DNA, 25 bp, synthetic construct
  misc_feature 1..25: note = Oligonucleotide
  source 1..25: mol_type = other DNA
tggacacactcggggaggggcgcag

SEQ ID NO: 32419 - DNA, 25 bp, synthetic construct
  misc_feature 1..25: note = Oligonucleotide
  source 1..25: mol_type = other DNA
agatggacacactcggggaggggcg

SEQ ID NO: 32420 - DNA, 25 bp, synthetic construct
  misc_feature 1..25: note = Oligonucleotide
  source 1..25: mol_type = other DNA
cacagatggacacactcggggaggg

SEQ ID NO: 32421 - DNA, 25 bp, synthetic construct
  misc_feature 1..25: note = Oligonucleotide
  source 1..25: mol_type = other DNA
acacacagatggacacactcgggga

SEQ ID NO: 32422 - DNA, 25 bp, synthetic construct
  misc_feature 1..25: note = Oligonucleotide
  source 1..25: mol_type = other DNA
gagacacacagatggacacactcgg

SEQ ID NO: 32423 - DNA, 25 bp, synthetic construct
  misc_feature 1..25: note = Oligonucleotide
  source 1..25: mol_type = other DNA
agagagacacacagatggacacact

SEQ ID NO: 32424 - DNA, 25 bp, synthetic construct
  misc_feature 1..25: note = Oligonucleotide
  source 1..25: mol_type = other DNA
gacagagagacacacagatggacac

SEQ ID NO: 32425 - DNA, 25 bp, synthetic construct
  misc_feature 1..25: note = Oligonucleotide
  source 1..25: mol_type = other DNA
ggggacagagagacacacagatgga

SEQ ID NO: 32426 - DNA, 25 bp, synthetic construct
  misc_feature 1..25: note = Oligonucleotide
  source 1..25: mol_type = other DNA
gtgggggacagagagacacacagat

SEQ ID NO: 32427 - DNA, 25 bp, synthetic construct
  misc_feature 1..25: note = Oligonucleotide
  source 1..25: mol_type = other DNA
catgtgggggacagagagacacaca

SEQ ID NO: 32428 - DNA, 25 bp, synthetic construct
  misc_feature 1..25: note = Oligonucleotide
  source 1..25: mol_type = other DNA
gggcatgtgggggacagagagacac

SEQ ID NO: 32429 - DNA, 25 bp, synthetic construct
  misc_feature 1..25: note = Oligonucleotide
  source 1..25: mol_type = other DNA
ggtgggcatgtgggggacagagaga

SEQ ID NO: 32430 - DNA, 25 bp, synthetic construct
  misc_feature 1..25: note = Oligonucleotide
  source 1..25: mol_type = other DNA
cagggtgggcatgtgggggacagag

SEQ ID NO: 32431 - DNA, 25 bp, synthetic construct
  misc_feature 1..25: note = Oligonucleotide
  source 1..25: mol_type = other DNA
gcacagggtgggcatgtgggggaca

SEQ ID NO: 32432 - DNA, 25 bp, synthetic construct
  misc_feature 1..25: note = Oligonucleotide
  source 1..25: mol_type = other DNA
tcggcacagggtgggcatgtggggg

SEQ ID NO: 32433 - DNA, 25 bp, synthetic construct
  misc_feature 1..25: note = Oligonucleotide
  source 1..25: mol_type = other DNA
ggctcggcacagggtgggcatgtgg

SEQ ID NO: 32434 - DNA, 25 bp, synthetic construct
  misc_feature 1..25: note = Oligonucleotide
  source 1..25: mol_type = other DNA
atgggctcggcacagggtgggcatg

SEQ ID NO: 32435 - DNA, 25 bp, synthetic construct
  misc_feature 1..25: note = Oligonucleotide
  source 1..25: mol_type = other DNA
cagatgggctcggcacagggtgggc

SEQ ID NO: 32436 - DNA, 25 bp, synthetic construct
  misc_feature 1..25: note = Oligonucleotide
  source 1..25: mol_type = other DNA
gaacagatgggctcggcacagggtg

SEQ ID NO: 32437 - DNA, 25 bp, synthetic construct
  misc_feature 1..25: note = Oligonucleotide
  source 1..25: mol_type = other DNA
aaggaacagatgggctcggcacagg

SEQ ID NO: 32438 - DNA, 25 bp, synthetic construct
  misc_feature 1..25: note = Oligonucleotide
  source 1..25: mol_type = other DNA
agaaaggaacagatgggctcggcac

SEQ ID NO: 32439 - DNA, 25 bp, synthetic construct
  misc_feature 1..25: note = Oligonucleotide
  source 1..25: mol_type = other DNA
gagagaaaggaacagatgggctcgg

SEQ ID NO: 32440 - DNA, 25 bp, synthetic construct
  misc_feature 1..25: note = Oligonucleotide
  source 1..25: mol_type = other DNA
gaagagagaaaggaacagatgggct

SEQ ID NO: 32441 - DNA, 25 bp, synthetic construct
  misc_feature 1..25: note = Oligonucleotide
  source 1..25: mol_type = other DNA
gcagaagagagaaaggaacagatgg

SEQ ID NO: 32442 - DNA, 25 bp, synthetic construct
  misc_feature 1..25: note = Oligonucleotide
  source 1..25: mol_type = other DNA
cacgcagaagagagaaaggaacaga

SEQ ID NO: 32443 - DNA, 25 bp, synthetic construct
  misc_feature 1..25: note = Oligonucleotide
  source 1..25: mol_type = other DNA
atccacgcagaagagagaaaggaac

SEQ ID NO: 32444 - DNA, 25 bp, synthetic construct
  misc_feature 1..25: note = Oligonucleotide
  source 1..25: mol_type = other DNA
gggatccacgcagaagagagaaagg

SEQ ID NO: 32445 - DNA, 25 bp, synthetic construct
  misc_feature 1..25: note = Oligonucleotide
  source 1..25: mol_type = other DNA
tttgggatccacgcagaagagagaa

SEQ ID NO: 32446 - DNA, 25 bp, synthetic construct
  misc_feature 1..25: note = Oligonucleotide
  source 1..25: mol_type = other DNA
gattttgggatccacgcagaagaga

SEQ ID NO: 32447 - DNA, 25 bp, synthetic construct
  misc_feature 1..25: note = Oligonucleotide
  source 1..25: mol_type = other DNA
gaagattttgggatccacgcagaag

SEQ ID NO: 32448 - DNA, 25 bp, synthetic construct
  misc_feature 1..25: note = Oligonucleotide
  source 1..25: mol_type = other DNA
tgggaagattttgggatccacgcag

SEQ ID NO: 32449 - DNA, 25 bp, synthetic construct
  misc_feature 1..25: note = Oligonucleotide
  source 1..25: mol_type = other DNA
ccctgggaagattttgggatccacg

SEQ ID NO: 32450 - DNA, 25 bp, synthetic construct
  misc_feature 1..25: note = Oligonucleotide
  source 1..25: mol_type = other DNA
tttccctgggaagattttgggatcc

SEQ ID NO: 32451 - DNA, 25 bp, synthetic construct
  misc_feature 1..25: note = Oligonucleotide
  source 1..25: mol_type = other DNA
ctttttccctgggaagattttggga

SEQ ID NO: 32452 - DNA, 25 bp, synthetic construct
  misc_feature 1..25: note = Oligonucleotide
  source 1..25: mol_type = other DNA
cagctttttccctgggaagattttg

SEQ ID NO: 32453 - DNA, 25 bp, synthetic construct
  misc_feature 1..25: note = Oligonucleotide
  source 1..25: mol_type = other DNA
tcccagctttttccctgggaagatt

SEQ ID NO: 32454 - DNA, 25 bp, synthetic construct
  misc_feature 1..25: note = Oligonucleotide
  source 1..25: mol_type = other DNA
ttctcccagctttttccctgggaag

SEQ ID NO: 32455 - DNA, 25 bp, synthetic construct
  misc_feature 1..25: note = Oligonucleotide
  source 1..25: mol_type = other DNA
actttctcccagctttttccctggg

SEQ ID NO: 32456 - DNA, 25 bp, synthetic construct
  misc_feature 1..25: note = Oligonucleotide
  source 1..25: mol_type = other DNA
cccactttctcccagctttttccct

SEQ ID NO: 32457 - DNA, 25 bp, synthetic construct
  misc_feature 1..25: note = Oligonucleotide
  source 1..25: mol_type = other DNA
cttcccactttctcccagctttttc

SEQ ID NO: 32458 - DNA, 25 bp, synthetic construct
  misc_feature 1..25: note = Oligonucleotide
  source 1..25: mol_type = other DNA
tcccttcccactttctcccagcttt

SEQ ID NO: 32459 - DNA, 25 bp, synthetic construct
  misc_feature 1..25: note = Oligonucleotide
  source 1..25: mol_type = other DNA
ccttcccttcccactttctcccagc

SEQ ID NO: 32460 - DNA, 25 bp, synthetic construct
  misc_feature 1..25: note = Oligonucleotide
  source 1..25: mol_type = other DNA
cctccttcccttcccactttctccc

SEQ ID NO: 32461 - DNA, 25 bp, synthetic construct
  misc_feature 1..25: note = Oligonucleotide
  source 1..25: mol_type = other DNA
ttccctccttcccttcccactttct

SEQ ID NO: 32462 - DNA, 25 bp, synthetic construct
  misc_feature 1..25: note = Oligonucleotide
  source 1..25: mol_type = other DNA
cctttccctccttcccttcccactt

SEQ ID NO: 32463 - DNA, 25 bp, synthetic construct
  misc_feature 1..25: note = Oligonucleotide
  source 1..25: mol_type = other DNA
tgccctttccctccttcccttccca

SEQ ID NO: 32464 - DNA, 25 bp, synthetic construct
  misc_feature 1..25: note = Oligonucleotide
  source 1..25: mol_type = other DNA
ccctgccctttccctccttcccttc

SEQ ID NO: 32465 - DNA, 25 bp, synthetic construct
  misc_feature 1..25: note = Oligonucleotide
  source 1..25: mol_type = other DNA
accccctgccctttccctccttccc

SEQ ID NO: 32466 - DNA, 25 bp, synthetic construct
  misc_feature 1..25: note = Oligonucleotide
  source 1..25: mol_type = other DNA
cccaccccctgccctttccctcctt

SEQ ID NO: 32467 - DNA, 25 bp, synthetic construct
  misc_feature 1..25: note = Oligonucleotide
  source 1..25: mol_type = other DNA
ccacccaccccctgccctttccctc

SEQ ID NO: 32468 - DNA, 25 bp, synthetic construct
  misc_feature 1..25: note = Oligonucleotide
  source 1..25: mol_type = other DNA
tgcccacccaccccctgccctttcc

SEQ ID NO: 32469 - DNA, 25 bp, synthetic construct
  misc_feature 1..25: note = Oligonucleotide
  source 1..25: mol_type = other DNA
ttctgcccacccaccccctgccctt

SEQ ID NO: 32470 - DNA, 25 bp, synthetic construct
  misc_feature 1..25: note = Oligonucleotide
  source 1..25: mol_type = other DNA
aggttctgcccacccaccccctgcc

SEQ ID NO: 32471 - DNA, 25 bp, synthetic construct
  misc_feature 1..25: note = Oligonucleotide
  source 1..25: mol_type = other DNA
agcaggttctgcccacccaccccct

SEQ ID NO: 32472 - DNA, 25 bp, synthetic construct
  misc_feature 1..25: note = Oligonucleotide
  source 1..25: mol_type = other DNA
aggagcaggttctgcccacccaccc

SEQ ID NO: 32473 - DNA, 25 bp, synthetic construct
  misc_feature 1..25: note = Oligonucleotide
  source 1..25: mol_type = other DNA
ctcaggagcaggttctgcccaccca

SEQ ID NO: 32474 - DNA, 25 bp, synthetic construct
  misc_feature 1..25: note = Oligonucleotide
  source 1..25: mol_type = other DNA
cacctcaggagcaggttctgcccac

SEQ ID NO: 32475 - DNA, 25 bp, synthetic construct
  misc_feature 1..25: note = Oligonucleotide
  source 1..25: mol_type = other DNA
ccccacctcaggagcaggttctgcc

SEQ ID NO: 32476 - DNA, 25 bp, synthetic construct
  misc_feature 1..25: note = Oligonucleotide
  source 1..25: mol_type = other DNA
ctaccccacctcaggagcaggttct

SEQ ID NO: 32477 - DNA, 25 bp, synthetic construct
  misc_feature 1..25: note = Oligonucleotide
  source 1..25: mol_type = other DNA
cgcctaccccacctcaggagcaggt

SEQ ID NO: 32478 - DNA, 25 bp, synthetic construct
  misc_feature 1..25: note = Oligonucleotide
  source 1..25: mol_type = other DNA
gggcgcctaccccacctcaggagca

SEQ ID NO: 32479 - DNA, 25 bp, synthetic construct
  misc_feature 1..25: note = Oligonucleotide
  source 1..25: mol_type = other DNA
gctgggcgcctaccccacctcagga

SEQ ID NO: 32480 - DNA, 25 bp, synthetic construct
  misc_feature 1..25: note = Oligonucleotide
  source 1..25: mol_type = other DNA
agagctgggcgcctaccccacctca

SEQ ID NO: 32481 - DNA, 25 bp, synthetic construct
  misc_feature 1..25: note = Oligonucleotide
  source 1..25: mol_type = other DNA
agcagagctgggcgcctaccccacc

SEQ ID NO: 32482 - DNA, 25 bp, synthetic construct
  misc_feature 1..25: note = Oligonucleotide
  source 1..25: mol_type = other DNA
gggagcagagctgggcgcctacccc

SEQ ID NO: 32483 - DNA, 25 bp, synthetic construct
  misc_feature 1..25: note = Oligonucleotide
  source 1..25: mol_type = other DNA
gtggggagcagagctgggcgcctac

SEQ ID NO: 32484 - DNA, 25 bp, synthetic construct
  misc_feature 1..25: note = Oligonucleotide
  source 1..25: mol_type = other DNA
tcagtggggagcagagctgggcgcc

SEQ ID NO: 32485 - DNA, 25 bp, synthetic construct
  misc_feature 1..25: note = Oligonucleotide
  source 1..25: mol_type = other DNA
ccgtcagtggggagcagagctgggc

SEQ ID NO: 32486 - DNA, 25 bp, synthetic construct
  misc_feature 1..25: note = Oligonucleotide
  source 1..25: mol_type = other DNA
aggccgtcagtggggagcagagctg

SEQ ID NO: 32487 - DNA, 25 bp, synthetic construct
  misc_feature 1..25: note = Oligonucleotide
  source 1..25: mol_type = other DNA
gacaggccgtcagtggggagcagag

SEQ ID NO: 32488 - DNA, 25 bp, synthetic construct
  misc_feature 1..25: note = Oligonucleotide
  source 1..25: mol_type = other DNA
ccagacaggccgtcagtggggagca

SEQ ID NO: 32489 - DNA, 25 bp, synthetic construct
  misc_feature 1..25: note = Oligonucleotide
  source 1..25: mol_type = other DNA
aagccagacaggccgtcagtgggga

SEQ ID NO: 32490 - DNA, 25 bp, synthetic construct
  misc_feature 1..25: note = Oligonucleotide
  source 1..25: mol_type = other DNA
aagaagccagacaggccgtcagtgg

SEQ ID NO: 32491 - DNA, 25 bp, synthetic construct
  misc_feature 1..25: note = Oligonucleotide
  source 1..25: mol_type = other DNA
aggaagaagccagacaggccgtcag

SEQ ID NO: 32492 - DNA, 25 bp, synthetic construct
  misc_feature 1..25: note = Oligonucleotide
  source 1..25: mol_type = other DNA
tggaggaagaagccagacaggccgt

SEQ ID NO: 32493 - DNA, 25 bp, synthetic construct
  misc_feature 1..25: note = Oligonucleotide
  source 1..25: mol_type = other DNA
cactggaggaagaagccagacaggc

SEQ ID NO: 32494 - DNA, 25 bp, synthetic construct
  misc_feature 1..25: note = Oligonucleotide
  source 1..25: mol_type = other DNA
gagcactggaggaagaagccagaca

SEQ ID NO: 32495 - DNA, 25 bp, synthetic construct
  misc_feature 1..25: note = Oligonucleotide
  source 1..25: mol_type = other DNA
gctgagcactggaggaagaagccag

SEQ ID NO: 32496 - DNA, 25 bp, synthetic construct
  misc_feature 1..25: note = Oligonucleotide
  source 1..25: mol_type = other DNA
aatgctgagcactggaggaagaagc

SEQ ID NO: 32497 - DNA, 25 bp, synthetic construct
  misc_feature 1..25: note = Oligonucleotide
  source 1..25: mol_type = other DNA
cccaatgctgagcactggaggaaga

SEQ ID NO: 32498 - DNA, 25 bp, synthetic construct
  misc_feature 1..25: note = Oligonucleotide
  source 1..25: mol_type = other DNA
ctccccaatgctgagcactggagga

SEQ ID NO: 32499 - DNA, 25 bp, synthetic construct
  misc_feature 1..25: note = Oligonucleotide
  source 1..25: mol_type = other DNA
gccctccccaatgctgagcactgga

SEQ ID NO: 32500 - DNA, 25 bp, synthetic construct
  misc_feature 1..25: note = Oligonucleotide
  source 1..25: mol_type = other DNA
accgccctccccaatgctgagcact

SEQ ID NO: 32501 - DNA, 25 bp, synthetic construct
  misc_feature 1..25: note = Oligonucleotide
  source 1..25: mol_type = other DNA
gaaaccgccctccccaatgctgagc

SEQ ID NO: 32502 - DNA, 25 bp, synthetic construct
  misc_feature 1..25: note = Oligonucleotide
  source 1..25: mol_type = other DNA
ccagaaaccgccctccccaatgctg

SEQ ID NO: 32503 - DNA, 25 bp, synthetic construct
  misc_feature 1..25: note = Oligonucleotide
  source 1..25: mol_type = other DNA
ctcccagaaaccgccctccccaatg

SEQ ID NO: 32504 - DNA, 25 bp, synthetic construct
  misc_feature 1..25: note = Oligonucleotide
  source 1..25: mol_type = other DNA
tccctcccagaaaccgccctcccca

SEQ ID NO: 32505 - DNA, 25 bp, synthetic construct
  misc_feature 1..25: note = Oligonucleotide
  source 1..25: mol_type = other DNA
ggttccctcccagaaaccgccctcc

SEQ ID NO: 32506 - DNA, 25 bp, synthetic construct
  misc_feature 1..25: note = Oligonucleotide
  source 1..25: mol_type = other DNA
cacggttccctcccagaaaccgccc

SEQ ID NO: 32507 - DNA, 25 bp, synthetic construct
  misc_feature 1..25: note = Oligonucleotide
  source 1..25: mol_type = other DNA
tttcacggttccctcccagaaaccg

SEQ ID NO: 32508 - DNA, 25 bp, synthetic construct
  misc_feature 1..25: note = Oligonucleotide
  source 1..25: mol_type = other DNA
gcctttcacggttccctcccagaaa

SEQ ID NO: 32509 - DNA, 25 bp, synthetic construct
  misc_feature 1..25: note = Oligonucleotide
  source 1..25: mol_type = other DNA
gcggcctttcacggttccctcccag

SEQ ID NO: 32510 - DNA, 25 bp, synthetic construct
  misc_feature 1..25: note = Oligonucleotide
  source 1..25: mol_type = other DNA
cgtgcggcctttcacggttccctcc

SEQ ID NO: 32511 - DNA, 25 bp, synthetic construct
  misc_feature 1..25: note = Oligonucleotide
  source 1..25: mol_type = other DNA
gcccgtgcggcctttcacggttccc

SEQ ID NO: 32512 - DNA, 25 bp, synthetic construct
  misc_feature 1..25: note = Oligonucleotide
  source 1..25: mol_type = other DNA
ccagcccgtgcggcctttcacggtt

SEQ ID NO: 32513 - DNA, 25 bp, synthetic construct
  misc_feature 1..25: note = Oligonucleotide
  source 1..25: mol_type = other DNA
gaaccagcccgtgcggcctttcacg

SEQ ID NO: 32514 - DNA, 25 bp, synthetic construct
  misc_feature 1..25: note = Oligonucleotide
  source 1..25: mol_type = other DNA
cgggaaccagcccgtgcggcctttc

SEQ ID NO: 32515 - DNA, 25 bp, synthetic construct
  misc_feature 1..25: note = Oligonucleotide
  source 1..25: mol_type = other DNA
ggccgggaaccagcccgtgcggcct

SEQ ID NO: 32516 - DNA, 25 bp, synthetic construct
  misc_feature 1..25: note = Oligonucleotide
  source 1..25: mol_type = other DNA
gtcggccgggaaccagcccgtgcgg

SEQ ID NO: 32517 - DNA, 25 bp, synthetic construct
  misc_feature 1..25: note = Oligonucleotide
  source 1..25: mol_type = other DNA
gcagtcggccgggaaccagcccgtg

SEQ ID NO: 32518 - DNA, 25 bp, synthetic construct
  misc_feature 1..25: note = Oligonucleotide
  source 1..25: mol_type = other DNA
cacgcagtcggccgggaaccagccc

SEQ ID NO: 32519 - DNA, 25 bp, synthetic construct
  misc_feature 1..25: note = Oligonucleotide
  source 1..25: mol_type = other DNA
ctccacgcagtcggccgggaaccag

SEQ ID NO: 32520 - DNA, 25 bp, synthetic construct
  misc_feature 1..25: note = Oligonucleotide
  source 1..25: mol_type = other DNA
ttcctccacgcagtcggccgggaac

SEQ ID NO: 32521 - DNA, 25 bp, synthetic construct
  misc_feature 1..25: note = Oligonucleotide
  source 1..25: mol_type = other DNA
cacttcctccacgcagtcggccggg

SEQ ID NO: 32522 - DNA, 25 bp, synthetic construct
  misc_feature 1..25: note = Oligonucleotide
  source 1..25: mol_type = other DNA
ctgcacttcctccacgcagtcggcc

SEQ ID NO: 32523 - DNA, 25 bp, synthetic construct
  misc_feature 1..25: note = Oligonucleotide
  source 1..25: mol_type = other DNA
catctgcacttcctccacgcagtcg

SEQ ID NO: 32524 - DNA, 25 bp, synthetic construct
  misc_feature 1..25: note = Oligonucleotide
  source 1..25: mol_type = other DNA
cctcatctgcacttcctccacgcag

SEQ ID NO: 32525 - DNA, 25 bp, synthetic construct
  misc_feature 1..25: note = Oligonucleotide
  source 1..25: mol_type = other DNA
ctgcctcatctgcacttcctccacg

SEQ ID NO: 32526 - DNA, 25 bp, synthetic construct
  misc_feature 1..25: note = Oligonucleotide
  source 1..25: mol_type = other DNA
atgctgcctcatctgcacttcctcc

SEQ ID NO: 32527 - DNA, 25 bp, synthetic construct
  misc_feature 1..25: note = Oligonucleotide
  source 1..25: mol_type = other DNA
gtcatgctgcctcatctgcacttcc

SEQ ID NO: 32528 - DNA, 25 bp, synthetic construct
  misc_feature 1..25: note = Oligonucleotide
  source 1..25: mol_type = other DNA
tgtgtcatgctgcctcatctgcact

SEQ ID NO: 32529 - DNA, 25 bp, synthetic construct
  misc_feature 1..25: note = Oligonucleotide
  source 1..25: mol_type = other DNA
ccgtgtgtcatgctgcctcatctgc

SEQ ID NO: 32530 - DNA, 25 bp, synthetic construct
  misc_feature 1..25: note = Oligonucleotide
  source 1..25: mol_type = other DNA
aggccgtgtgtcatgctgcctcatc

SEQ ID NO: 32531 - DNA, 25 bp, synthetic construct
  misc_feature 1..25: note = Oligonucleotide
  source 1..25: mol_type = other DNA
accaggccgtgtgtcatgctgcctc

SEQ ID NO: 32532 - DNA, 25 bp, synthetic construct
  misc_feature 1..25: note = Oligonucleotide
  source 1..25: mol_type = other DNA
ctcaccaggccgtgtgtcatgctgc

SEQ ID NO: 32533 - DNA, 25 bp, synthetic construct
  misc_feature 1..25: note = Oligonucleotide
  source 1..25: mol_type = other DNA
tcactcaccaggccgtgtgtcatgc

SEQ ID NO: 32534 - DNA, 25 bp, synthetic construct
  misc_feature 1..25: note = Oligonucleotide
  source 1..25: mol_type = other DNA
gggtcactcaccaggccgtgtgtca

SEQ ID NO: 32535 - DNA, 25 bp, synthetic construct
  misc_feature 1..25: note = Oligonucleotide
  source 1..25: mol_type = other DNA
gtggggtcactcaccaggccgtgtg

SEQ ID NO: 32536 - DNA, 25 bp, synthetic construct
  misc_feature 1..25: note = Oligonucleotide
  source 1..25: mol_type = other DNA
gccgtggggtcactcaccaggccgt

SEQ ID NO: 32537 - DNA, 25 bp, synthetic construct
  misc_feature 1..25: note = Oligonucleotide
  source 1..25: mol_type = other DNA
ggagccgtggggtcactcaccaggc

SEQ ID NO: 32538 - DNA, 25 bp, synthetic construct
  misc_feature 1..25: note = Oligonucleotide
  source 1..25: mol_type = other DNA
cggggagccgtggggtcactcacca

SEQ ID NO: 32539 - DNA, 25 bp, synthetic construct
  misc_feature 1..25: note = Oligonucleotide
  source 1..25: mol_type = other DNA
gcccggggagccgtggggtcactca

SEQ ID NO: 32540 - DNA, 25 bp, synthetic construct
  misc_feature 1..25: note = Oligonucleotide
  source 1..25: mol_type = other DNA
gctgcccggggagccgtggggtcac

SEQ ID NO: 32541 - DNA, 25 bp, synthetic construct
  misc_feature 1..25: note = Oligonucleotide
  source 1..25: mol_type = other DNA
ggagctgcccggggagccgtggggt

SEQ ID NO: 32542 - DNA, 25 bp, synthetic construct
  misc_feature 1..25: note = Oligonucleotide
  source 1..25: mol_type = other DNA
ttgggagctgcccggggagccgtgg

SEQ ID NO: 32543 - DNA, 25 bp, synthetic construct
  misc_feature 1..25: note = Oligonucleotide
  source 1..25: mol_type = other DNA
cccttgggagctgcccggggagccg

SEQ ID NO: 32544 - DNA, 25 bp, synthetic construct
  misc_feature 1..25: note = Oligonucleotide
  source 1..25: mol_type = other DNA
gtccccttgggagctgcccggggag

SEQ ID NO: 32545 - DNA, 25 bp, synthetic construct
  misc_feature 1..25: note = Oligonucleotide
  source 1..25: mol_type = other DNA
gtggtccccttgggagctgcccggg

SEQ ID NO: 32546 - DNA, 25 bp, synthetic construct
  misc_feature 1..25: note = Oligonucleotide
  source 1..25: mol_type = other DNA
ggggtggtccccttgggagctgccc

SEQ ID NO: 32547 - DNA, 25 bp, synthetic construct
  misc_feature 1..25: note = Oligonucleotide
  source 1..25: mol_type = other DNA
gaaggggtggtccccttgggagctg

SEQ ID NO: 32548 - DNA, 25 bp, synthetic construct
  misc_feature 1..25: note = Oligonucleotide
  source 1..25: mol_type = other DNA
ctggaaggggtggtccccttgggag

SEQ ID NO: 32549 - DNA, 25 bp, synthetic construct
  misc_feature 1..25: note = Oligonucleotide
  source 1..25: mol_type = other DNA
aaactggaaggggtggtccccttgg

SEQ ID NO: 32550 - DNA, 25 bp, synthetic construct
  misc_feature 1..25: note = Oligonucleotide
  source 1..25: mol_type = other DNA
gggaaactggaaggggtggtcccct

SEQ ID NO: 32551 - DNA, 25 bp, synthetic construct
  misc_feature 1..25: note = Oligonucleotide
  source 1..25: mol_type = other DNA
aaagggaaactggaaggggtggtcc

SEQ ID NO: 32552 - DNA, 25 bp, synthetic construct
  misc_feature 1..25: note = Oligonucleotide
  source 1..25: mol_type = other DNA
aacaaagggaaactggaaggggtgg

SEQ ID NO: 32553 - DNA, 25 bp, synthetic construct
  misc_feature 1..25: note = Oligonucleotide
  source 1..25: mol_type = other DNA
gagaacaaagggaaactggaagggg

SEQ ID NO: 32554 - DNA, 25 bp, synthetic construct
  misc_feature 1..25: note = Oligonucleotide
  source 1..25: mol_type = other DNA
agagagaacaaagggaaactggaag

SEQ ID NO: 32555 - DNA, 25 bp, synthetic construct
  misc_feature 1..25: note = Oligonucleotide
  source 1..25: mol_type = other DNA
ccaagagagaacaaagggaaactgg

SEQ ID NO: 32556 - DNA, 25 bp, synthetic construct
  misc_feature 1..25: note = Oligonucleotide
  source 1..25: mol_type = other DNA
gcaccaagagagaacaaagggaaac

SEQ ID NO: 32557 - DNA, 25 bp, synthetic construct
  misc_feature 1..25: note = Oligonucleotide
  source 1..25: mol_type = other DNA
ttagcaccaagagagaacaaaggga

SEQ ID NO: 32558 - DNA, 25 bp, synthetic construct
  misc_feature 1..25: note = Oligonucleotide
  source 1..25: mol_type = other DNA
gatttagcaccaagagagaacaaag

SEQ ID NO: 32559 - DNA, 25 bp, synthetic construct
  misc_feature 1..25: note = Oligonucleotide
  source 1..25: mol_type = other DNA
gtggatttagcaccaagagagaaca

SEQ ID NO: 32560 - DNA, 25 bp, synthetic construct
  misc_feature 1..25: note = Oligonucleotide
  source 1..25: mol_type = other DNA
catgtggatttagcaccaagagaga

SEQ ID NO: 32561 - DNA, 25 bp, synthetic construct
  misc_feature 1..25: note = Oligonucleotide
  source 1..25: mol_type = other DNA
atccatgtggatttagcaccaagag

SEQ ID NO: 32562 - DNA, 25 bp, synthetic construct
  misc_feature 1..25: note = Oligonucleotide
  source 1..25: mol_type = other DNA
aatatccatgtggatttagcaccaa

SEQ ID NO: 32563 - DNA, 25 bp, synthetic construct
  misc_feature 1..25: note = Oligonucleotide
  source 1..25: mol_type = other DNA
atgaatatccatgtggatttagcac

SEQ ID NO: 32564 - DNA, 25 bp, synthetic construct
  misc_feature 1..25: note = Oligonucleotide
  source 1..25: mol_type = other DNA
tctatgaatatccatgtggatttag

SEQ ID NO: 32565 - DNA, 25 bp, synthetic construct
  misc_feature 1..25: note = Oligonucleotide
  source 1..25: mol_type = other DNA
ttctctatgaatatccatgtggatt

SEQ ID NO: 32566 - DNA, 25 bp, synthetic construct
  misc_feature 1..25: note = Oligonucleotide
  source 1..25: mol_type = other DNA
cttttctctatgaatatccatgtgg

SEQ ID NO: 32567 - DNA, 25 bp, synthetic construct
  misc_feature 1..25: note = Oligonucleotide
  source 1..25: mol_type = other DNA
agtcttttctctatgaatatccatg

SEQ ID NO: 32568 - DNA, 25 bp, synthetic construct
  misc_feature 1..25: note = Oligonucleotide
  source 1..25: mol_type = other DNA
tctagtcttttctctatgaatatcc

SEQ ID NO: 32569 - DNA, 25 bp, synthetic construct
  misc_feature 1..25: note = Oligonucleotide
  source 1..25: mol_type = other DNA
acctctagtcttttctctatgaata

SEQ ID NO: 32570 - DNA, 25 bp, synthetic construct
  misc_feature 1..25: note = Oligonucleotide
  source 1..25: mol_type = other DNA
tttacctctagtcttttctctatga

SEQ ID NO: 32571 - DNA, 25 bp, synthetic construct
  misc_feature 1..25: note = Oligonucleotide
  source 1..25: mol_type = other DNA
gagtttacctctagtcttttctcta

SEQ ID NO: 32572 - DNA, 25 bp, synthetic construct
  misc_feature 1..25: note = Oligonucleotide
  source 1..25: mol_type = other DNA
tttgagtttacctctagtcttttct

SEQ ID NO: 32573 - DNA, 25 bp, synthetic construct
  misc_feature 1..25: note = Oligonucleotide
  source 1..25: mol_type = other DNA
ttgtttgagtttacctctagtcttt

SEQ ID NO: 32574 - DNA, 25 bp, synthetic construct
  misc_feature 1..25: note = Oligonucleotide
  source 1..25: mol_type = other DNA
tgtttgtttgagtttacctctagtc

SEQ ID NO: 32575 - DNA, 25 bp, synthetic construct
  misc_feature 1..25: note = Oligonucleotide
  source 1..25: mol_type = other DNA
gagtgtttgtttgagtttacctcta

SEQ ID NO: 32576 - DNA, 25 bp, synthetic construct
  misc_feature 1..25: note = Oligonucleotide
  source 1..25: mol_type = other DNA
tttgagtgtttgtttgagtttacct

SEQ ID NO: 32577 - DNA, 25 bp, synthetic construct
  misc_feature 1..25: note = Oligonucleotide
  source 1..25: mol_type = other DNA
tactttgagtgtttgtttgagttta

SEQ ID NO: 32578 - DNA, 25 bp, synthetic construct
  misc_feature 1..25: note = Oligonucleotide
  source 1..25: mol_type = other DNA
atctactttgagtgtttgtttgagt

SEQ ID NO: 32579 - DNA, 25 bp, synthetic construct
  misc_feature 1..25: note = Oligonucleotide
  source 1..25: mol_type = other DNA
tgcatctactttgagtgtttgtttg

SEQ ID NO: 32580 - DNA, 25 bp, synthetic construct
  misc_feature 1..25: note = Oligonucleotide
  source 1..25: mol_type = other DNA
gtttgcatctactttgagtgtttgt

SEQ ID NO: 32581 - DNA, 25 bp, synthetic construct
  misc_feature 1..25: note = Oligonucleotide
  source 1..25: mol_type = other DNA
caagtttgcatctactttgagtgtt

SEQ ID NO: 32582 - DNA, 25 bp, synthetic construct
  misc_feature 1..25: note = Oligonucleotide
  source 1..25: mol_type = other DNA
acacaagtttgcatctactttgagt

SEQ ID NO: 32583 - DNA, 25 bp, synthetic construct
  misc_feature 1..25: note = Oligonucleotide
  source 1..25: mol_type = other DNA
tgtacacaagtttgcatctactttg

SEQ ID NO: 32584 - DNA, 25 bp, synthetic construct
  misc_feature 1..25: note = Oligonucleotide
  source 1..25: mol_type = other DNA
tcatgtacacaagtttgcatctact

SEQ ID NO: 32585 - DNA, 25 bp, synthetic construct
  misc_feature 1..25: note = Oligonucleotide
  source 1..25: mol_type = other DNA
gtgtcatgtacacaagtttgcatct

SEQ ID NO: 32586 - DNA, 25 bp, synthetic construct
  misc_feature 1..25: note = Oligonucleotide
  source 1..25: mol_type = other DNA
tctgtgtcatgtacacaagtttgca

SEQ ID NO: 32587 - DNA, 25 bp, synthetic construct
  misc_feature 1..25: note = Oligonucleotide
  source 1..25: mol_type = other DNA
gtgtctgtgtcatgtacacaagttt

SEQ ID NO: 32588 - DNA, 25 bp, synthetic construct
  misc_feature 1..25: note = Oligonucleotide
  source 1..25: mol_type = other DNA
cacgtgtctgtgtcatgtacacaag

SEQ ID NO: 32589 - DNA, 25 bp, synthetic construct
  misc_feature 1..25: note = Oligonucleotide
  source 1..25: mol_type = other DNA
gcacacgtgtctgtgtcatgtacac

SEQ ID NO: 32590 - DNA, 25 bp, synthetic construct
  misc_feature 1..25: note = Oligonucleotide
  source 1..25: mol_type = other DNA
tgtgcacacgtgtctgtgtcatgta

SEQ ID NO: 32591 - DNA, 25 bp, synthetic construct
  misc_feature 1..25: note = Oligonucleotide
  source 1..25: mol_type = other DNA
gtgtgtgcacacgtgtctgtgtcat

SEQ ID NO: 32592 - DNA, 25 bp, synthetic construct
  misc_feature 1..25: note = Oligonucleotide
  source 1..25: mol_type = other DNA
agagtgtgtgcacacgtgtctgtgt

SEQ ID NO: 32593 - DNA, 25 bp, synthetic construct
  misc_feature 1..25: note = Oligonucleotide
  source 1..25: mol_type = other DNA
tgcagagtgtgtgcacacgtgtctg

SEQ ID NO: 32594 - DNA, 25 bp, synthetic construct
  misc_feature 1..25: note = Oligonucleotide
  source 1..25: mol_type = other DNA
atatgcagagtgtgtgcacacgtgt

SEQ ID NO: 32595 - DNA, 25 bp, synthetic construct
  misc_feature 1..25: note = Oligonucleotide
  source 1..25: mol_type = other DNA
agtatatgcagagtgtgtgcacacg

SEQ ID NO: 32596 - DNA, 25 bp, synthetic construct
  misc_feature 1..25: note = Oligonucleotide
  source 1..25: mol_type = other DNA
ccaagtatatgcagagtgtgtgcac

SEQ ID NO: 32597 - DNA, 25 bp, synthetic construct
  misc_feature 1..25: note = Oligonucleotide
  source 1..25: mol_type = other DNA
ttcccaagtatatgcagagtgtgtg

SEQ ID NO: 32598 - DNA, 25 bp, synthetic construct
  misc_feature 1..25: note = Oligonucleotide
  source 1..25: mol_type = other DNA
atgttcccaagtatatgcagagtgt

SEQ ID NO: 32599 - DNA, 25 bp, synthetic construct
  misc_feature 1..25: note = Oligonucleotide
  source 1..25: mol_type = other DNA
cgcatgttcccaagtatatgcagag

SEQ ID NO: 32600 - DNA, 25 bp, synthetic construct
  misc_feature 1..25: note = Oligonucleotide
  source 1..25: mol_type = other DNA
acacgcatgttcccaagtatatgca

SEQ ID NO: 32601 - DNA, 25 bp, synthetic construct
  misc_feature 1..25: note = Oligonucleotide
  source 1..25: mol_type = other DNA
catacacgcatgttcccaagtatat

SEQ ID NO: 32602 - DNA, 25 bp, synthetic construct
  misc_feature 1..25: note = Oligonucleotide
  source 1..25: mol_type = other DNA
ttacatacacgcatgttcccaagta

SEQ ID NO: 32603 - DNA, 25 bp, synthetic construct
  misc_feature 1..25: note = Oligonucleotide
  source 1..25: mol_type = other DNA
aggttacatacacgcatgttcccaa

SEQ ID NO: 32604 - DNA, 25 bp, synthetic construct
  misc_feature 1..25: note = Oligonucleotide
  source 1..25: mol_type = other DNA
gtcaggttacatacacgcatgttcc

SEQ ID NO: 32605 - DNA, 25 bp, synthetic construct
  misc_feature 1..25: note = Oligonucleotide
  source 1..25: mol_type = other DNA
agcgtcaggttacatacacgcatgt

SEQ ID NO: 32606 - DNA, 25 bp, synthetic construct
  misc_feature 1..25: note = Oligonucleotide
  source 1..25: mol_type = other DNA
tgaagcgtcaggttacatacacgca

SEQ ID NO: 32607 - DNA, 25 bp, synthetic construct
  misc_feature 1..25: note = Oligonucleotide
  source 1..25: mol_type = other DNA
acgtgaagcgtcaggttacatacac

SEQ ID NO: 32608 - DNA, 25 bp, synthetic construct
  misc_feature 1..25: note = Oligonucleotide
  source 1..25: mol_type = other DNA
tgcacgtgaagcgtcaggttacata

SEQ ID NO: 32609 - DNA, 25 bp, synthetic construct
  misc_feature 1..25: note = Oligonucleotide
  source 1..25: mol_type = other DNA
cactgcacgtgaagcgtcaggttac

SEQ ID NO: 32610 - DNA, 25 bp, synthetic construct
  misc_feature 1..25: note = Oligonucleotide
  source 1..25: mol_type = other DNA
ctccactgcacgtgaagcgtcaggt

SEQ ID NO: 32611 - DNA, 25 bp, synthetic construct
  misc_feature 1..25: note = Oligonucleotide
  source 1..25: mol_type = other DNA
tgtctccactgcacgtgaagcgtca

SEQ ID NO: 32612 - DNA, 25 bp, synthetic construct
  misc_feature 1..25: note = Oligonucleotide
  source 1..25: mol_type = other DNA
atgtgtctccactgcacgtgaagcg

SEQ ID NO: 32613 - DNA, 25 bp, synthetic construct
  misc_feature 1..25: note = Oligonucleotide
  source 1..25: mol_type = other DNA
cctatgtgtctccactgcacgtgaa

SEQ ID NO: 32614 - DNA, 25 bp, synthetic construct
  misc_feature 1..25: note = Oligonucleotide
  source 1..25: mol_type = other DNA
cgtcctatgtgtctccactgcacgt

SEQ ID NO: 32615 - DNA, 25 bp, synthetic construct
  misc_feature 1..25: note = Oligonucleotide
  source 1..25: mol_type = other DNA
acacgtcctatgtgtctccactgca

SEQ ID NO: 32616 - DNA, 25 bp, synthetic construct
  misc_feature 1..25: note = Oligonucleotide
  source 1..25: mol_type = other DNA
cacacacgtcctatgtgtctccact

SEQ ID NO: 32617 - DNA, 25 bp, synthetic construct
  misc_feature 1..25: note = Oligonucleotide
  source 1..25: mol_type = other DNA
cgtcacacacgtcctatgtgtctcc

SEQ ID NO: 32618 - DNA, 25 bp, synthetic construct
  misc_feature 1..25: note = Oligonucleotide
  source 1..25: mol_type = other DNA
ccccgtcacacacgtcctatgtgtc

SEQ ID NO: 32619 - DNA, 25 bp, synthetic construct
  misc_feature 1..25: note = Oligonucleotide
  source 1..25: mol_type = other DNA
aggccccgtcacacacgtcctatgt

SEQ ID NO: 32620 - DNA, 25 bp, synthetic construct
  misc_feature 1..25: note = Oligonucleotide
  source 1..25: mol_type = other DNA
cagaggccccgtcacacacgtccta

SEQ ID NO: 32621 - DNA, 25 bp, synthetic construct
  misc_feature 1..25: note = Oligonucleotide
  source 1..25: mol_type = other DNA
agacagaggccccgtcacacacgtc

SEQ ID NO: 32622 - DNA, 25 bp, synthetic construct
  misc_feature 1..25: note = Oligonucleotide
  source 1..25: mol_type = other DNA
cacagacagaggccccgtcacacac

SEQ ID NO: 32623 - DNA, 25 bp, synthetic construct
  misc_feature 1..25: note = Oligonucleotide
  source 1..25: mol_type = other DNA
tcacacagacagaggccccgtcaca

SEQ ID NO: 32624 - DNA, 25 bp, synthetic construct
  misc_feature 1..25: note = Oligonucleotide
  source 1..25: mol_type = other DNA
ggatcacacagacagaggccccgtc

SEQ ID NO: 32625 - DNA, 25 bp, synthetic construct
  misc_feature 1..25: note = Oligonucleotide
  source 1..25: mol_type = other DNA
gtgggatcacacagacagaggcccc

SEQ ID NO: 32626 - DNA, 25 bp, synthetic construct
  misc_feature 1..25: note = Oligonucleotide
  source 1..25: mol_type = other DNA
aatgtgggatcacacagacagaggc

SEQ ID NO: 32627 - DNA, 25 bp, synthetic construct
  misc_feature 1..25: note = Oligonucleotide
  source 1..25: mol_type = other DNA
gtcaatgtgggatcacacagacaga

SEQ ID NO: 32628 - DNA, 25 bp, synthetic construct
  misc_feature 1..25: note = Oligonucleotide
  source 1..25: mol_type = other DNA
ggagtcaatgtgggatcacacagac

SEQ ID NO: 32629 - DNA, 25 bp, synthetic construct
  misc_feature 1..25: note = Oligonucleotide
  source 1..25: mol_type = other DNA
ctgggagtcaatgtgggatcacaca

SEQ ID NO: 32630 - DNA, 25 bp, synthetic construct
  misc_feature 1..25: note = Oligonucleotide
  source 1..25: mol_type = other DNA
tcactgggagtcaatgtgggatcac

SEQ ID NO: 32631 - DNA, 25 bp, synthetic construct
  misc_feature 1..25: note = Oligonucleotide
  source 1..25: mol_type = other DNA
aagtcactgggagtcaatgtgggat

SEQ ID NO: 32632 - DNA, 25 bp, synthetic construct
  misc_feature 1..25: note = Oligonucleotide
  source 1..25: mol_type = other DNA
tgcaagtcactgggagtcaatgtgg

SEQ ID NO: 32633 - DNA, 25 bp, synthetic construct
  misc_feature 1..25: note = Oligonucleotide
  source 1..25: mol_type = other DNA
gggtgcaagtcactgggagtcaatg

SEQ ID NO: 32634 - DNA, 25 bp, synthetic construct
  misc_feature 1..25: note = Oligonucleotide
  source 1..25: mol_type = other DNA
gtggggtgcaagtcactgggagtca

SEQ ID NO: 32635 - DNA, 25 bp, synthetic construct
  misc_feature 1..25: note = Oligonucleotide
  source 1..25: mol_type = other DNA
ctggtggggtgcaagtcactgggag

SEQ ID NO: 32636 - DNA, 25 bp, synthetic construct
  misc_feature 1..25: note = Oligonucleotide
  source 1..25: mol_type = other DNA
gtgctggtggggtgcaagtcactgg

SEQ ID NO: 32637 - DNA, 25 bp, synthetic construct
  misc_feature 1..25: note = Oligonucleotide
  source 1..25: mol_type = other DNA
actgtgctggtggggtgcaagtcac

SEQ ID NO: 32638 - DNA, 25 bp, synthetic construct
  misc_feature 1..25: note = Oligonucleotide
  source 1..25: mol_type = other DNA
aggactgtgctggtggggtgcaagt

SEQ ID NO: 32639 - DNA, 25 bp, synthetic construct
  misc_feature 1..25: note = Oligonucleotide
  source 1..25: mol_type = other DNA
tgaaggactgtgctggtggggtgca

SEQ ID NO: 32640 - DNA, 25 bp, synthetic construct
  misc_feature 1..25: note = Oligonucleotide
  source 1..25: mol_type = other DNA
ttctgaaggactgtgctggtggggt

SEQ ID NO: 32641 - DNA, 25 bp, synthetic construct
  misc_feature 1..25: note = Oligonucleotide
  source 1..25: mol_type = other DNA
tgtttctgaaggactgtgctggtgg

SEQ ID NO: 32642 - DNA, 25 bp, synthetic construct
  misc_feature 1..25: note = Oligonucleotide
  source 1..25: mol_type = other DNA
tggtgtttctgaaggactgtgctgg

SEQ ID NO: 32643 - DNA, 25 bp, synthetic construct
  misc_feature 1..25: note = Oligonucleotide
  source 1..25: mol_type = other DNA
acctggtgtttctgaaggactgtgc

SEQ ID NO: 32644 - DNA, 25 bp, synthetic construct
  misc_feature 1..25: note = Oligonucleotide
  source 1..25: mol_type = other DNA
cacacctggtgtttctgaaggactg

SEQ ID NO: 32645 - DNA, 25 bp, synthetic construct
  misc_feature 1..25: note = Oligonucleotide
  source 1..25: mol_type = other DNA
ccacacacctggtgtttctgaagga

SEQ ID NO: 32646 - DNA, 25 bp, synthetic construct
  misc_feature 1..25: note = Oligonucleotide
  source 1..25: mol_type = other DNA
gttccacacacctggtgtttctgaa

SEQ ID NO: 32647 - DNA, 25 bp, synthetic construct
  misc_feature 1..25: note = Oligonucleotide
  source 1..25: mol_type = other DNA
tgcgttccacacacctggtgtttct

SEQ ID NO: 32648 - DNA, 25 bp, synthetic construct
  misc_feature 1..25: note = Oligonucleotide
  source 1..25: mol_type = other DNA
tcatgcgttccacacacctggtgtt

SEQ ID NO: 32649 - DNA, 25 bp, synthetic construct
  misc_feature 1..25: note = Oligonucleotide
  source 1..25: mol_type = other DNA
gaatcatgcgttccacacacctggt

SEQ ID NO: 32650 - DNA, 25 bp, synthetic construct
  misc_feature 1..25: note = Oligonucleotide
  source 1..25: mol_type = other DNA
caggaatcatgcgttccacacacct

SEQ ID NO: 32651 - DNA, 25 bp, synthetic construct
  misc_feature 1..25: note = Oligonucleotide
  source 1..25: mol_type = other DNA
acgcaggaatcatgcgttccacaca

SEQ ID NO: 32652 - DNA, 25 bp, synthetic construct
  misc_feature 1..25: note = Oligonucleotide
  source 1..25: mol_type = other DNA
gctacgcaggaatcatgcgttccac

SEQ ID NO: 32653 - DNA, 25 bp, synthetic construct
  misc_feature 1..25: note = Oligonucleotide
  source 1..25: mol_type = other DNA
ccagctacgcaggaatcatgcgttc

SEQ ID NO: 32654 - DNA, 25 bp, synthetic construct
  misc_feature 1..25: note = Oligonucleotide
  source 1..25: mol_type = other DNA
ctgccagctacgcaggaatcatgcg

SEQ ID NO: 32655 - DNA, 25 bp, synthetic construct
  misc_feature 1..25: note = Oligonucleotide
  source 1..25: mol_type = other DNA
tgtctgccagctacgcaggaatcat

SEQ ID NO: 32656 - DNA, 25 bp, synthetic construct
  misc_feature 1..25: note = Oligonucleotide
  source 1..25: mol_type = other DNA
acatgtctgccagctacgcaggaat

SEQ ID NO: 32657 - DNA, 25 bp, synthetic construct
  misc_feature 1..25: note = Oligonucleotide
  source 1..25: mol_type = other DNA
cttacatgtctgccagctacgcagg

SEQ ID NO: 32658 - DNA, 25 bp, synthetic construct
  misc_feature 1..25: note = Oligonucleotide
  source 1..25: mol_type = other DNA
ctccttacatgtctgccagctacgc

SEQ ID NO: 32659 - DNA, 25 bp, synthetic construct
  misc_feature 1..25: note = Oligonucleotide
  source 1..25: mol_type = other DNA
gacctccttacatgtctgccagcta

SEQ ID NO: 32660 - DNA, 25 bp, synthetic construct
  misc_feature 1..25: note = Oligonucleotide
  source 1..25: mol_type = other DNA
actgacctccttacatgtctgccag

SEQ ID NO: 32661 - DNA, 25 bp, synthetic construct
  misc_feature 1..25: note = Oligonucleotide
  source 1..25: mol_type = other DNA
cacactgacctccttacatgtctgc

SEQ ID NO: 32662 - DNA, 25 bp, synthetic construct
  misc_feature 1..25: note = Oligonucleotide
  source 1..25: mol_type = other DNA
tctcacactgacctccttacatgtc

SEQ ID NO: 32663 - DNA, 25 bp, synthetic construct
  misc_feature 1..25: note = Oligonucleotide
  source 1..25: mol_type = other DNA
ttttctcacactgacctccttacat

SEQ ID NO: 32664 - DNA, 25 bp, synthetic construct
  misc_feature 1..25: note = Oligonucleotide
  source 1..25: mol_type = other DNA
ctcttttctcacactgacctcctta

SEQ ID NO: 32665 - DNA, 25 bp, synthetic construct
  misc_feature 1..25: note = Oligonucleotide
  source 1..25: mol_type = other DNA
cgcctcttttctcacactgacctcc

SEQ ID NO: 32666 - DNA, 25 bp, synthetic construct
  misc_feature 1..25: note = Oligonucleotide
  source 1..25: mol_type = other DNA
aaacgcctcttttctcacactgacc

SEQ ID NO: 32667 - DNA, 25 bp, synthetic construct
  misc_feature 1..25: note = Oligonucleotide
  source 1..25: mol_type = other DNA
gaaaaacgcctcttttctcacactg

SEQ ID NO: 32668 - DNA, 25 bp, synthetic construct
  misc_feature 1..25: note = Oligonucleotide
  source 1..25: mol_type = other DNA
ttggaaaaacgcctcttttctcaca

SEQ ID NO: 32669 - DNA, 25 bp, synthetic construct
  misc_feature 1..25: note = Oligonucleotide
  source 1..25: mol_type = other DNA
actttggaaaaacgcctcttttctc

SEQ ID NO: 32670 - DNA, 25 bp, synthetic construct
  misc_feature 1..25: note = Oligonucleotide
  source 1..25: mol_type = other DNA
tccactttggaaaaacgcctctttt

SEQ ID NO: 32671 - DNA, 25 bp, synthetic construct
  misc_feature 1..25: note = Oligonucleotide
  source 1..25: mol_type = other DNA
ctgtccactttggaaaaacgcctct

SEQ ID NO: 32672 - DNA, 25 bp, synthetic construct
  misc_feature 1..25: note = Oligonucleotide
  source 1..25: mol_type = other DNA
aatctgtccactttggaaaaacgcc

SEQ ID NO: 32673 - DNA, 25 bp, synthetic construct
  misc_feature 1..25: note = Oligonucleotide
  source 1..25: mol_type = other DNA
gacaatctgtccactttggaaaaac

SEQ ID NO: 32674 - DNA, 25 bp, synthetic construct
  misc_feature 1..25: note = Oligonucleotide
  source 1..25: mol_type = other DNA
ttggacaatctgtccactttggaaa

SEQ ID NO: 32675 - DNA, 25 bp, synthetic construct
  misc_feature 1..25: note = Oligonucleotide
  source 1..25: mol_type = other DNA
cacttggacaatctgtccactttgg

SEQ ID NO: 32676 - DNA, 25 bp, synthetic construct
  misc_feature 1..25: note = Oligonucleotide
  source 1..25: mol_type = other DNA
gcccacttggacaatctgtccactt

SEQ ID NO: 32677 - DNA, 25 bp, synthetic construct
  misc_feature 1..25: note = Oligonucleotide
  source 1..25: mol_type = other DNA
tctgcccacttggacaatctgtcca

SEQ ID NO: 32678 - DNA, 25 bp, synthetic construct
  misc_feature 1..25: note = Oligonucleotide
  source 1..25: mol_type = other DNA
tgctctgcccacttggacaatctgt

SEQ ID NO: 32679 - DNA, 25 bp, synthetic construct
  misc_feature 1..25: note = Oligonucleotide
  source 1..25: mol_type = other DNA
gcctgctctgcccacttggacaatc

SEQ ID NO: 32680 - DNA, 25 bp, synthetic construct
  misc_feature 1..25: note = Oligonucleotide
  source 1..25: mol_type = other DNA
cctgcctgctctgcccacttggaca

SEQ ID NO: 32681 - DNA, 25 bp, synthetic construct
  misc_feature 1..25: note = Oligonucleotide
  source 1..25: mol_type = other DNA
gggcctgcctgctctgcccacttgg

SEQ ID NO: 32682 - DNA, 25 bp, synthetic construct
  misc_feature 1..25: note = Oligonucleotide
  source 1..25: mol_type = other DNA
tccgggcctgcctgctctgcccact

SEQ ID NO: 32683 - DNA, 25 bp, synthetic construct
  misc_feature 1..25: note = Oligonucleotide
  source 1..25: mol_type = other DNA
tgctccgggcctgcctgctctgccc

SEQ ID NO: 32684 - DNA, 25 bp, synthetic construct
  misc_feature 1..25: note = Oligonucleotide
  source 1..25: mol_type = other DNA
ggctgctccgggcctgcctgctctg

SEQ ID NO: 32685 - DNA, 25 bp, synthetic construct
  misc_feature 1..25: note = Oligonucleotide
  source 1..25: mol_type = other DNA
cttggctgctccgggcctgcctgct

SEQ ID NO: 32686 - DNA, 25 bp, synthetic construct
  misc_feature 1..25: note = Oligonucleotide
  source 1..25: mol_type = other DNA
cctcttggctgctccgggcctgcct

SEQ ID NO: 32687 - DNA, 25 bp, synthetic construct
  misc_feature 1..25: note = Oligonucleotide
  source 1..25: mol_type = other DNA
tttcctcttggctgctccgggcctg

SEQ ID NO: 32688 - DNA, 25 bp, synthetic construct
  misc_feature 1..25: note = Oligonucleotide
  source 1..25: mol_type = other DNA
tcatttcctcttggctgctccgggc

SEQ ID NO: 32689 - DNA, 25 bp, synthetic construct
  misc_feature 1..25: note = Oligonucleotide
  source 1..25: mol_type = other DNA
gcctcatttcctcttggctgctccg

SEQ ID NO: 32690 - DNA, 25 bp, synthetic construct
  misc_feature 1..25: note = Oligonucleotide
  source 1..25: mol_type = other DNA
ctggcctcatttcctcttggctgct

SEQ ID NO: 32691 - DNA, 25 bp, synthetic construct
  misc_feature 1..25: note = Oligonucleotide
  source 1..25: mol_type = other DNA
caactggcctcatttcctcttggct

SEQ ID NO: 32692 - DNA, 25 bp, synthetic construct
  misc_feature 1..25: note = Oligonucleotide
  source 1..25: mol_type = other DNA
gcccaactggcctcatttcctcttg

SEQ ID NO: 32693 - DNA, 25 bp, synthetic construct
  misc_feature 1..25: note = Oligonucleotide
  source 1..25: mol_type = other DNA
caggcccaactggcctcatttcctc

SEQ ID NO: 32694 - DNA, 25 bp, synthetic construct
  misc_feature 1..25: note = Oligonucleotide
  source 1..25: mol_type = other DNA
ctccaggcccaactggcctcatttc

SEQ ID NO: 32695 - DNA, 25 bp, synthetic construct
  misc_feature 1..25: note = Oligonucleotide
  source 1..25: mol_type = other DNA
cacctccaggcccaactggcctcat

SEQ ID NO: 32696 - DNA, 25 bp, synthetic construct
  misc_feature 1..25: note = Oligonucleotide
  source 1..25: mol_type = other DNA
gggcacctccaggcccaactggcct

SEQ ID NO: 32697 - DNA, 25 bp, synthetic construct
  misc_feature 1..25: note = Oligonucleotide
  source 1..25: mol_type = other DNA
ccagggcacctccaggcccaactgg

SEQ ID NO: 32698 - DNA, 25 bp, synthetic construct
  misc_feature 1..25: note = Oligonucleotide
  source 1..25: mol_type = other DNA
tcaccagggcacctccaggcccaac

SEQ ID NO: 32699 - DNA, 25 bp, synthetic construct
  misc_feature 1..25: note = Oligonucleotide
  source 1..25: mol_type = other DNA
cactcaccagggcacctccaggccc

SEQ ID NO: 32700 - DNA, 25 bp, synthetic construct
  misc_feature 1..25: note = Oligonucleotide
  source 1..25: mol_type = other DNA
gggcactcaccagggcacctccagg

SEQ ID NO: 32701 - DNA, 25 bp, synthetic construct
  misc_feature 1..25: note = Oligonucleotide
  source 1..25: mol_type = other DNA
ccagggcactcaccagggcacctcc

SEQ ID NO: 32702 - DNA, 25 bp, synthetic construct
  misc_feature 1..25: note = Oligonucleotide
  source 1..25: mol_type = other DNA
gccccagggcactcaccagggcacc

SEQ ID NO: 32703 - DNA, 25 bp, synthetic construct
  misc_feature 1..25: note = Oligonucleotide
  source 1..25: mol_type = other DNA
cctgccccagggcactcaccagggc

SEQ ID NO: 32704 - DNA, 25 bp, synthetic construct
  misc_feature 1..25: note = Oligonucleotide
  source 1..25: mol_type = other DNA
atccctgccccagggcactcaccag

SEQ ID NO: 32705 - DNA, 25 bp, synthetic construct
  misc_feature 1..25: note = Oligonucleotide
  source 1..25: mol_type = other DNA
accatccctgccccagggcactcac

SEQ ID NO: 32706 - DNA, 25 bp, synthetic construct
  misc_feature 1..25: note = Oligonucleotide
  source 1..25: mol_type = other DNA
cagaccatccctgccccagggcact

SEQ ID NO: 32707 - DNA, 25 bp, synthetic construct
  misc_feature 1..25: note = Oligonucleotide
  source 1..25: mol_type = other DNA
cctcagaccatccctgccccagggc

SEQ ID NO: 32708 - DNA, 25 bp, synthetic construct
  misc_feature 1..25: note = Oligonucleotide
  source 1..25: mol_type = other DNA
tgccctcagaccatccctgccccag

SEQ ID NO: 32709 - DNA, 25 bp, synthetic construct
  misc_feature 1..25: note = Oligonucleotide
  source 1..25: mol_type = other DNA
tgctgccctcagaccatccctgccc

SEQ ID NO: 32710 - DNA, 25 bp, synthetic construct
  misc_feature 1..25: note = Oligonucleotide
  source 1..25: mol_type = other DNA
acctgctgccctcagaccatccctg

SEQ ID NO: 32711 - DNA, 25 bp, synthetic construct
  misc_feature 1..25: note = Oligonucleotide
  source 1..25: mol_type = other DNA
ctcacctgctgccctcagaccatcc

SEQ ID NO: 32712 - DNA, 25 bp, synthetic construct
  misc_feature 1..25: note = Oligonucleotide
  source 1..25: mol_type = other DNA
agcctcacctgctgccctcagacca

SEQ ID NO: 32713 - DNA, 25 bp, synthetic construct
  misc_feature 1..25: note = Oligonucleotide
  source 1..25: mol_type = other DNA
cccagcctcacctgctgccctcaga

SEQ ID NO: 32714 - DNA, 25 bp, synthetic construct
  misc_feature 1..25: note = Oligonucleotide
  source 1..25: mol_type = other DNA
cagcccagcctcacctgctgccctc

SEQ ID NO: 32715 - DNA, 25 bp, synthetic construct
  misc_feature 1..25: note = Oligonucleotide
  source 1..25: mol_type = other DNA
gaccagcccagcctcacctgctgcc

SEQ ID NO: 32716 - DNA, 25 bp, synthetic construct
  misc_feature 1..25: note = Oligonucleotide
  source 1..25: mol_type = other DNA
gaggaccagcccagcctcacctgct

SEQ ID NO: 32717 - DNA, 25 bp, synthetic construct
  misc_feature 1..25: note = Oligonucleotide
  source 1..25: mol_type = other DNA
gctgaggaccagcccagcctcacct

SEQ ID NO: 32718 - DNA, 25 bp, synthetic construct
  misc_feature 1..25: note = Oligonucleotide
  source 1..25: mol_type = other DNA
caggctgaggaccagcccagcctca

SEQ ID NO: 32719 - DNA, 25 bp, synthetic construct
  misc_feature 1..25: note = Oligonucleotide
  source 1..25: mol_type = other DNA
ctgcaggctgaggaccagcccagcc

SEQ ID NO: 32720 - DNA, 25 bp, synthetic construct
  misc_feature 1..25: note = Oligonucleotide
  source 1..25: mol_type = other DNA
tccctgcaggctgaggaccagccca

SEQ ID NO: 32721 - DNA, 25 bp, synthetic construct
  misc_feature 1..25: note = Oligonucleotide
  source 1..25: mol_type = other DNA
tcctccctgcaggctgaggaccagc

SEQ ID NO: 32722 - DNA, 25 bp, synthetic construct
  misc_feature 1..25: note = Oligonucleotide
  source 1..25: mol_type = other DNA
acatcctccctgcaggctgaggacc

SEQ ID NO: 32723 - DNA, 25 bp, synthetic construct
  misc_feature 1..25: note = Oligonucleotide
  source 1..25: mol_type = other DNA
ttcacatcctccctgcaggctgagg

SEQ ID NO: 32724 - DNA, 25 bp, synthetic construct
  misc_feature 1..25: note = Oligonucleotide
  source 1..25: mol_type = other DNA
accttcacatcctccctgcaggctg

SEQ ID NO: 32725 - DNA, 25 bp, synthetic construct
  misc_feature 1..25: note = Oligonucleotide
  source 1..25: mol_type = other DNA
ttcaccttcacatcctccctgcagg

SEQ ID NO: 32726 - DNA, 25 bp, synthetic construct
  misc_feature 1..25: note = Oligonucleotide
  source 1..25: mol_type = other DNA
gccttcaccttcacatcctccctgc

SEQ ID NO: 32727 - DNA, 25 bp, synthetic construct
  misc_feature 1..25: note = Oligonucleotide
  source 1..25: mol_type = other DNA
gcagccttcaccttcacatcctccc

SEQ ID NO: 32728 - DNA, 25 bp, synthetic construct
  misc_feature 1..25: note = Oligonucleotide
  source 1..25: mol_type = other DNA
gctgcagccttcaccttcacatcct

SEQ ID NO: 32729 - DNA, 25 bp, synthetic construct
  misc_feature 1..25: note = Oligonucleotide
  source 1..25: mol_type = other DNA
ggagctgcagccttcaccttcacat

SEQ ID NO: 32730 - DNA, 25 bp, synthetic construct
  misc_feature 1..25: note = Oligonucleotide
  source 1..25: mol_type = other DNA
ccaggagctgcagccttcaccttca

SEQ ID NO: 32731 - DNA, 25 bp, synthetic construct
  misc_feature 1..25: note = Oligonucleotide
  source 1..25: mol_type = other DNA
aacccaggagctgcagccttcacct

SEQ ID NO: 32732 - DNA, 25 bp, synthetic construct
  misc_feature 1..25: note = Oligonucleotide
  source 1..25: mol_type = other DNA
accaacccaggagctgcagccttca

SEQ ID NO: 32733 - DNA, 25 bp, synthetic construct
  misc_feature 1..25: note = Oligonucleotide
  source 1..25: mol_type = other DNA
ctcaccaacccaggagctgcagcct

SEQ ID NO: 32734 - DNA, 25 bp, synthetic construct
  misc_feature 1..25: note = Oligonucleotide
  source 1..25: mol_type = other DNA
ccactcaccaacccaggagctgcag

SEQ ID NO: 32735 - DNA, 25 bp, synthetic construct
  misc_feature 1..25: note = Oligonucleotide
  source 1..25: mol_type = other DNA
cagccactcaccaacccaggagctg

SEQ ID NO: 32736 - DNA, 25 bp, synthetic construct
  misc_feature 1..25: note = Oligonucleotide
  source 1..25: mol_type = other DNA
cagcagccactcaccaacccaggag

SEQ ID NO: 32737 - DNA, 25 bp, synthetic construct
  misc_feature 1..25: note = Oligonucleotide
  source 1..25: mol_type = other DNA
ggacagcagccactcaccaacccag

SEQ ID NO: 32738 - DNA, 25 bp, synthetic construct
  misc_feature 1..25: note = Oligonucleotide
  source 1..25: mol_type = other DNA
gctggacagcagccactcaccaacc

SEQ ID NO: 32739 - DNA, 25 bp, synthetic construct
  misc_feature 1..25: note = Oligonucleotide
  source 1..25: mol_type = other DNA
agggctggacagcagccactcacca

SEQ ID NO: 32740 - DNA, 25 bp, synthetic construct
  misc_feature 1..25: note = Oligonucleotide
  source 1..25: mol_type = other DNA
agcagggctggacagcagccactca

SEQ ID NO: 32741 - DNA, 25 bp, synthetic construct
  misc_feature 1..25: note = Oligonucleotide
  source 1..25: mol_type = other DNA
gtcagcagggctggacagcagccac

SEQ ID NO: 32742 - DNA, 25 bp, synthetic construct
  misc_feature 1..25: note = Oligonucleotide
  source 1..25: mol_type = other DNA
atggtcagcagggctggacagcagc

SEQ ID NO: 32743 - DNA, 25 bp, synthetic construct
  misc_feature 1..25: note = Oligonucleotide
  source 1..25: mol_type = other DNA
cagatggtcagcagggctggacagc

SEQ ID NO: 32744 - DNA, 25 bp, synthetic construct
  misc_feature 1..25: note = Oligonucleotide
  source 1..25: mol_type = other DNA
gaccagatggtcagcagggctggac

SEQ ID NO: 32745 - DNA, 25 bp, synthetic construct
  misc_feature 1..25: note = Oligonucleotide
  source 1..25: mol_type = other DNA
aaggaccagatggtcagcagggctg

SEQ ID NO: 32746 - DNA, 25 bp, synthetic construct
  misc_feature 1..25: note = Oligonucleotide
  source 1..25: mol_type = other DNA
ccaaaggaccagatggtcagcaggg

SEQ ID NO: 32747 - DNA, 25 bp, synthetic construct
  misc_feature 1..25: note = Oligonucleotide
  source 1..25: mol_type = other DNA
cccccaaaggaccagatggtcagca

SEQ ID NO: 32748 - DNA, 25 bp, synthetic construct
  misc_feature 1..25: note = Oligonucleotide
  source 1..25: mol_type = other DNA
gggcccccaaaggaccagatggtca

SEQ ID NO: 32749 - DNA, 25 bp, synthetic construct
  misc_feature 1..25: note = Oligonucleotide
  source 1..25: mol_type = other DNA
cgggggcccccaaaggaccagatgg

SEQ ID NO: 32750 - DNA, 25 bp, synthetic construct
  misc_feature 1..25: note = Oligonucleotide
  source 1..25: mol_type = other DNA
gcccgggggcccccaaaggaccaga

SEQ ID NO: 32751 - DNA, 25 bp, synthetic construct
  misc_feature 1..25: note = Oligonucleotide
  source 1..25: mol_type = other DNA
ccagcccgggggcccccaaaggacc

SEQ ID NO: 32752 - DNA, 25 bp, synthetic construct
  misc_feature 1..25: note = Oligonucleotide
  source 1..25: mol_type = other DNA
gctccagcccgggggcccccaaagg

SEQ ID NO: 32753 - DNA, 25 bp, synthetic construct
  misc_feature 1..25: note = Oligonucleotide
  source 1..25: mol_type = other DNA
ccagctccagcccgggggcccccaa

SEQ ID NO: 32754 - DNA, 25 bp, synthetic construct
  misc_feature 1..25: note = Oligonucleotide
  source 1..25: mol_type = other DNA
cacccagctccagcccgggggcccc

SEQ ID NO: 32755 - DNA, 25 bp, synthetic construct
  misc_feature 1..25: note = Oligonucleotide
  source 1..25: mol_type = other DNA
acgcacccagctccagcccgggggc

SEQ ID NO: 32756 - DNA, 25 bp, synthetic construct
  misc_feature 1..25: note = Oligonucleotide
  source 1..25: mol_type = other DNA
gacacgcacccagctccagcccggg

SEQ ID NO: 32757 - DNA, 25 bp, synthetic construct
  misc_feature 1..25: note = Oligonucleotide
  source 1..25: mol_type = other DNA
caagacacgcacccagctccagccc

SEQ ID NO: 32758 - DNA, 25 bp, synthetic construct
  misc_feature 1..25: note = Oligonucleotide
  source 1..25: mol_type = other DNA
ccccaagacacgcacccagctccag

SEQ ID NO: 32759 - DNA, 25 bp, synthetic construct
  misc_feature 1..25: note = Oligonucleotide
  source 1..25: mol_type = other DNA
cacccccaagacacgcacccagctc

SEQ ID NO: 32760 - DNA, 25 bp, synthetic construct
  misc_feature 1..25: note = Oligonucleotide
  source 1..25: mol_type = other DNA
gggcacccccaagacacgcacccag

SEQ ID NO: 32761 - DNA, 25 bp, synthetic construct
  misc_feature 1..25: note = Oligonucleotide
  source 1..25: mol_type = other DNA
caagggcacccccaagacacgcacc

SEQ ID NO: 32762 - DNA, 25 bp, synthetic construct
  misc_feature 1..25: note = Oligonucleotide
  source 1..25: mol_type = other DNA
ttgcaagggcacccccaagacacgc

SEQ ID NO: 32763 - DNA, 25 bp, synthetic construct
  misc_feature 1..25: note = Oligonucleotide
  source 1..25: mol_type = other DNA
tccttgcaagggcacccccaagaca

SEQ ID NO: 32764 - DNA, 25 bp, synthetic construct
  misc_feature 1..25: note = Oligonucleotide
  source 1..25: mol_type = other DNA
ggttccttgcaagggcacccccaag

SEQ ID NO: 32765 - DNA, 25 bp, synthetic construct
  misc_feature 1..25: note = Oligonucleotide
  source 1..25: mol_type = other DNA
gagggttccttgcaagggcaccccc

SEQ ID NO: 32766 - DNA, 25 bp, synthetic construct
  misc_feature 1..25: note = Oligonucleotide
  source 1..25: mol_type = other DNA
cctgagggttccttgcaagggcacc

SEQ ID NO: 32767 - DNA, 25 bp, synthetic construct
  misc_feature 1..25: note = Oligonucleotide
  source 1..25: mol_type = other DNA
acccctgagggttccttgcaagggc

SEQ ID NO: 32768 - DNA, 25 bp, synthetic construct
  misc_feature 1..25: note = Oligonucleotide
  source 1..25: mol_type = other DNA
gggacccctgagggttccttgcaag

SEQ ID NO: 32769 - DNA, 25 bp, synthetic construct
  misc_feature 1..25: note = Oligonucleotide
  source 1..25: mol_type = other DNA
cccgggacccctgagggttccttgc

SEQ ID NO: 32770 - DNA, 25 bp, synthetic construct
  misc_feature 1..25: note = Oligonucleotide
  source 1..25: mol_type = other DNA
cctcccgggacccctgagggttcct

SEQ ID NO: 32771 - DNA, 25 bp, synthetic construct
  misc_feature 1..25: note = Oligonucleotide
  source 1..25: mol_type = other DNA
gggcctcccgggacccctgagggtt

SEQ ID NO: 32772 - DNA, 25 bp, synthetic construct
  misc_feature 1..25: note = Oligonucleotide
  source 1..25: mol_type = other DNA
tgggggcctcccgggacccctgagg

SEQ ID NO: 32773 - DNA, 25 bp, synthetic construct
  misc_feature 1..25: note = Oligonucleotide
  source 1..25: mol_type = other DNA
atctgggggcctcccgggacccctg

SEQ ID NO: 32774 - DNA, 25 bp, synthetic construct
  misc_feature 1..25: note = Oligonucleotide
  source 1..25: mol_type = other DNA
tggatctgggggcctcccgggaccc

SEQ ID NO: 32775 - DNA, 25 bp, synthetic construct
  misc_feature 1..25: note = Oligonucleotide
  source 1..25: mol_type = other DNA
gcatggatctgggggcctcccggga

SEQ ID NO: 32776 - DNA, 25 bp, synthetic construct
  misc_feature 1..25: note = Oligonucleotide
  source 1..25: mol_type = other DNA
catgcatggatctgggggcctcccg

SEQ ID NO: 32777 - DNA, 25 bp, synthetic construct
  misc_feature 1..25: note = Oligonucleotide
  source 1..25: mol_type = other DNA
gcacatgcatggatctgggggcctc

SEQ ID NO: 32778 - DNA, 25 bp, synthetic construct
  misc_feature 1..25: note = Oligonucleotide
  source 1..25: mol_type = other DNA
gaagcacatgcatggatctgggggc

SEQ ID NO: 32779 - DNA, 25 bp, synthetic construct
  misc_feature 1..25: note = Oligonucleotide
  source 1..25: mol_type = other DNA
acagaagcacatgcatggatctggg

SEQ ID NO: 32780 - DNA, 25 bp, synthetic construct
  misc_feature 1..25: note = Oligonucleotide
  source 1..25: mol_type = other DNA
aggacagaagcacatgcatggatct

SEQ ID NO: 32781 - DNA, 25 bp, synthetic construct
  misc_feature 1..25: note = Oligonucleotide
  source 1..25: mol_type = other DNA
tccaggacagaagcacatgcatgga

SEQ ID NO: 32782 - DNA, 25 bp, synthetic construct
  misc_feature 1..25: note = Oligonucleotide
  source 1..25: mol_type = other DNA
ctctccaggacagaagcacatgcat

SEQ ID NO: 32783 - DNA, 25 bp, synthetic construct
  misc_feature 1..25: note = Oligonucleotide
  source 1..25: mol_type = other DNA
cagctctccaggacagaagcacatg

SEQ ID NO: 32784 - DNA, 25 bp, synthetic construct
  misc_feature 1..25: note = Oligonucleotide
  source 1..25: mol_type = other DNA
caccagctctccaggacagaagcac

SEQ ID NO: 32785 - DNA, 25 bp, synthetic construct
  misc_feature 1..25: note = Oligonucleotide
  source 1..25: mol_type = other DNA
gcccaccagctctccaggacagaag

SEQ ID NO: 32786 - DNA, 25 bp, synthetic construct
  misc_feature 1..25: note = Oligonucleotide
  source 1..25: mol_type = other DNA
ttggcccaccagctctccaggacag

SEQ ID NO: 32787 - DNA, 25 bp, synthetic construct
  misc_feature 1..25: note = Oligonucleotide
  source 1..25: mol_type = other DNA
tgcttggcccaccagctctccagga

SEQ ID NO: 32788 - DNA, 25 bp, synthetic construct
  misc_feature 1..25: note = Oligonucleotide
  source 1..25: mol_type = other DNA
gtttgcttggcccaccagctctcca

SEQ ID NO: 32789 - DNA, 25 bp, synthetic construct
  misc_feature 1..25: note = Oligonucleotide
  source 1..25: mol_type = other DNA
gaggtttgcttggcccaccagctct

SEQ ID NO: 32790 - DNA, 25 bp, synthetic construct
  misc_feature 1..25: note = Oligonucleotide
  source 1..25: mol_type = other DNA
ggagaggtttgcttggcccaccagc

SEQ ID NO: 32791 - DNA, 25 bp, synthetic construct
  misc_feature 1..25: note = Oligonucleotide
  source 1..25: mol_type = other DNA
tcaggagaggtttgcttggcccacc

SEQ ID NO: 32792 - DNA, 25 bp, synthetic construct
  misc_feature 1..25: note = Oligonucleotide
  source 1..25: mol_type = other DNA
cactcaggagaggtttgcttggccc

SEQ ID NO: 32793 - DNA, 25 bp, synthetic construct
  misc_feature 1..25: note = Oligonucleotide
  source 1..25: mol_type = other DNA
catcactcaggagaggtttgcttgg

SEQ ID NO: 32794 - DNA, 25 bp, synthetic construct
  misc_feature 1..25: note = Oligonucleotide
  source 1..25: mol_type = other DNA
gaccatcactcaggagaggtttgct

SEQ ID NO: 32795 - DNA, 25 bp, synthetic construct
  misc_feature 1..25: note = Oligonucleotide
  source 1..25: mol_type = other DNA
agtgaccatcactcaggagaggttt

SEQ ID NO: 32796 - DNA, 25 bp, synthetic construct
  misc_feature 1..25: note = Oligonucleotide
  source 1..25: mol_type = other DNA
cccagtgaccatcactcaggagagg

SEQ ID NO: 32797 - DNA, 25 bp, synthetic construct
  misc_feature 1..25: note = Oligonucleotide
  source 1..25: mol_type = other DNA
gcccccagtgaccatcactcaggag

SEQ ID NO: 32798 - DNA, 25 bp, synthetic construct
  misc_feature 1..25: note = Oligonucleotide
  source 1..25: mol_type = other DNA
atggcccccagtgaccatcactcag

SEQ ID NO: 32799 - DNA, 25 bp, synthetic construct
  misc_feature 1..25: note = Oligonucleotide
  source 1..25: mol_type = other DNA
ccgatggcccccagtgaccatcact

SEQ ID NO: 32800 - DNA, 25 bp, synthetic construct
  misc_feature 1..25: note = Oligonucleotide
  source 1..25: mol_type = other DNA
ccaccgatggcccccagtgaccatc

SEQ ID NO: 32801 - DNA, 25 bp, synthetic construct
  misc_feature 1..25: note = Oligonucleotide
  source 1..25: mol_type = other DNA
acaccaccgatggcccccagtgacc

SEQ ID NO: 32802 - DNA, 25 bp, synthetic construct
  misc_feature 1..25: note = Oligonucleotide
  source 1..25: mol_type = other DNA
gacacaccaccgatggcccccagtg

SEQ ID NO: 32803 - DNA, 25 bp, synthetic construct
  misc_feature 1..25: note = Oligonucleotide
  source 1..25: mol_type = other DNA
ccagacacaccaccgatggccccca

SEQ ID NO: 32804 - DNA, 25 bp, synthetic construct
  misc_feature 1..25: note = Oligonucleotide
  source 1..25: mol_type = other DNA
gatccagacacaccaccgatggccc

SEQ ID NO: 32805 - DNA, 25 bp, synthetic construct
  misc_feature 1..25: note = Oligonucleotide
  source 1..25: mol_type = other DNA
cttgatccagacacaccaccgatgg

SEQ ID NO: 32806 - DNA, 25 bp, synthetic construct
  misc_feature 1..25: note = Oligonucleotide
  source 1..25: mol_type = other DNA
acccttgatccagacacaccaccga

SEQ ID NO: 32807 - DNA, 25 bp, synthetic construct
  misc_feature 1..25: note = Oligonucleotide
  source 1..25: mol_type = other DNA
tgcacccttgatccagacacaccac

SEQ ID NO: 32808 - DNA, 25 bp, synthetic construct
  misc_feature 1..25: note = Oligonucleotide
  source 1..25: mol_type = other DNA
gcatgcacccttgatccagacacac

SEQ ID NO: 32809 - DNA, 25 bp, synthetic construct
  misc_feature 1..25: note = Oligonucleotide
  source 1..25: mol_type = other DNA
ggtgcatgcacccttgatccagaca

SEQ ID NO: 32810 - DNA, 25 bp, synthetic construct
  misc_feature 1..25: note = Oligonucleotide
  source 1..25: mol_type = other DNA
gagggtgcatgcacccttgatccag

SEQ ID NO: 32811 - DNA, 25 bp, synthetic construct
  misc_feature 1..25: note = Oligonucleotide
  source 1..25: mol_type = other DNA
agggagggtgcatgcacccttgatc

SEQ ID NO: 32812 - DNA, 25 bp, synthetic construct
  misc_feature 1..25: note = Oligonucleotide
  source 1..25: mol_type = other DNA
cagagggagggtgcatgcacccttg

SEQ ID NO: 32813 - DNA, 25 bp, synthetic construct
  misc_feature 1..25: note = Oligonucleotide
  source 1..25: mol_type = other DNA
atgcagagggagggtgcatgcaccc

SEQ ID NO: 32814 - DNA, 25 bp, synthetic construct
  misc_feature 1..25: note = Oligonucleotide
  source 1..25: mol_type = other DNA
cacatgcagagggagggtgcatgca

SEQ ID NO: 32815 - DNA, 25 bp, synthetic construct
  misc_feature 1..25: note = Oligonucleotide
  source 1..25: mol_type = other DNA
cttcacatgcagagggagggtgcat

SEQ ID NO: 32816 - DNA, 25 bp, synthetic construct
  misc_feature 1..25: note = Oligonucleotide
  source 1..25: mol_type = other DNA
gcccttcacatgcagagggagggtg

SEQ ID NO: 32817 - DNA, 25 bp, synthetic construct
  misc_feature 1..25: note = Oligonucleotide
  source 1..25: mol_type = other DNA
tgagcccttcacatgcagagggagg

SEQ ID NO: 32818 - DNA, 25 bp, synthetic construct
  misc_feature 1..25: note = Oligonucleotide
  source 1..25: mol_type = other DNA
gcctgagcccttcacatgcagaggg

SEQ ID NO: 32819 - DNA, 25 bp, synthetic construct
  misc_feature 1..25: note = Oligonucleotide
  source 1..25: mol_type = other DNA
caggcctgagcccttcacatgcaga

SEQ ID NO: 32820 - DNA, 25 bp, synthetic construct
  misc_feature 1..25: note = Oligonucleotide
  source 1..25: mol_type = other DNA
ccccaggcctgagcccttcacatgc

SEQ ID NO: 32821 - DNA, 25 bp, synthetic construct
  misc_feature 1..25: note = Oligonucleotide
  source 1..25: mol_type = other DNA
taaccccaggcctgagcccttcaca

SEQ ID NO: 32822 - DNA, 25 bp, synthetic construct
  misc_feature 1..25: note = Oligonucleotide
  source 1..25: mol_type = other DNA
cagtaaccccaggcctgagcccttc

SEQ ID NO: 32823 - DNA, 25 bp, synthetic construct
  misc_feature 1..25: note = Oligonucleotide
  source 1..25: mol_type = other DNA
acacagtaaccccaggcctgagccc

SEQ ID NO: 32824 - DNA, 25 bp, synthetic construct
  misc_feature 1..25: note = Oligonucleotide
  source 1..25: mol_type = other DNA
gggacacagtaaccccaggcctgag

SEQ ID NO: 32825 - DNA, 25 bp, synthetic construct
  misc_feature 1..25: note = Oligonucleotide
  source 1..25: mol_type = other DNA
atggggacacagtaaccccaggcct

SEQ ID NO: 32826 - DNA, 25 bp, synthetic construct
  misc_feature 1..25: note = Oligonucleotide
  source 1..25: mol_type = other DNA
gagatggggacacagtaaccccagg

SEQ ID NO: 32827 - DNA, 25 bp, synthetic construct
  misc_feature 1..25: note = Oligonucleotide
  source 1..25: mol_type = other DNA
acagagatggggacacagtaacccc

SEQ ID NO: 32828 - DNA, 25 bp, synthetic construct
  misc_feature 1..25: note = Oligonucleotide
  source 1..25: mol_type = other DNA
gacacagagatggggacacagtaac

SEQ ID NO: 32829 - DNA, 25 bp, synthetic construct
  misc_feature 1..25: note = Oligonucleotide
  source 1..25: mol_type = other DNA
ggggacacagagatggggacacagt

SEQ ID NO: 32830 - DNA, 25 bp, synthetic construct
  misc_feature 1..25: note = Oligonucleotide
  source 1..25: mol_type = other DNA
ggtggggacacagagatggggacac

SEQ ID NO: 32831 - DNA, 25 bp, synthetic construct
  misc_feature 1..25: note = Oligonucleotide
  source 1..25: mol_type = other DNA
agaggtggggacacagagatgggga

SEQ ID NO: 32832 - DNA, 25 bp, synthetic construct
  misc_feature 1..25: note = Oligonucleotide
  source 1..25: mol_type = other DNA
ctcagaggtggggacacagagatgg

SEQ ID NO: 32833 - DNA, 25 bp, synthetic construct
  misc_feature 1..25: note = Oligonucleotide
  source 1..25: mol_type = other DNA
actctcagaggtggggacacagaga

SEQ ID NO: 32834 - DNA, 25 bp, synthetic construct
  misc_feature 1..25: note = Oligonucleotide
  source 1..25: mol_type = other DNA
gaaactctcagaggtggggacacag

SEQ ID NO: 32835 - DNA, 25 bp, synthetic construct
  misc_feature 1..25: note = Oligonucleotide
  source 1..25: mol_type = other DNA
tgggaaactctcagaggtggggaca

SEQ ID NO: 32836 - DNA, 25 bp, synthetic construct
  misc_feature 1..25: note = Oligonucleotide
  source 1..25: mol_type = other DNA
cgctgggaaactctcagaggtgggg

SEQ ID NO: 32837 - DNA, 25 bp, synthetic construct
  misc_feature 1..25: note = Oligonucleotide
  source 1..25: mol_type = other DNA
agtcgctgggaaactctcagaggtg

SEQ ID NO: 32838 - DNA, 25 bp, synthetic construct
  misc_feature 1..25: note = Oligonucleotide
  source 1..25: mol_type = other DNA
tggagtcgctgggaaactctcagag

SEQ ID NO: 32839 - DNA, 25 bp, synthetic construct
  misc_feature 1..25: note = Oligonucleotide
  source 1..25: mol_type = other DNA
gggtggagtcgctgggaaactctca

SEQ ID NO: 32840 - DNA, 25 bp, synthetic construct
  misc_feature 1..25: note = Oligonucleotide
  source 1..25: mol_type = other DNA
caggggtggagtcgctgggaaactc

SEQ ID NO: 32841 - DNA, 25 bp, synthetic construct
  misc_feature 1..25: note = Oligonucleotide
  source 1..25: mol_type = other DNA
gtacaggggtggagtcgctgggaaa

SEQ ID NO: 32842 - DNA, 25 bp, synthetic construct
  misc_feature 1..25: note = Oligonucleotide
  source 1..25: mol_type = other DNA
gccgtacaggggtggagtcgctggg

SEQ ID NO: 32843 - DNA, 25 bp, synthetic construct
  misc_feature 1..25: note = Oligonucleotide
  source 1..25: mol_type = other DNA
caggccgtacaggggtggagtcgct

SEQ ID NO: 32844 - DNA, 25 bp, synthetic construct
  misc_feature 1..25: note = Oligonucleotide
  source 1..25: mol_type = other DNA
gtccaggccgtacaggggtggagtc

SEQ ID NO: 32845 - DNA, 25 bp, synthetic construct
  misc_feature 1..25: note = Oligonucleotide
  source 1..25: mol_type = other DNA
ggggtccaggccgtacaggggtgga

SEQ ID NO: 32846 - DNA, 25 bp, synthetic construct
  misc_feature 1..25: note = Oligonucleotide
  source 1..25: mol_type = other DNA
gcaggggtccaggccgtacaggggt

SEQ ID NO: 32847 - DNA, 25 bp, synthetic construct
  misc_feature 1..25: note = Oligonucleotide
  source 1..25: mol_type = other DNA
agggcaggggtccaggccgtacagg

SEQ ID NO: 32848 - DNA, 25 bp, synthetic construct
  misc_feature 1..25: note = Oligonucleotide
  source 1..25: mol_type = other DNA
cacagggcaggggtccaggccgtac

SEQ ID NO: 32849 - DNA, 25 bp, synthetic construct
  misc_feature 1..25: note = Oligonucleotide
  source 1..25: mol_type = other DNA
cagcacagggcaggggtccaggccg

SEQ ID NO: 32850 - DNA, 25 bp, synthetic construct
  misc_feature 1..25: note = Oligonucleotide
  source 1..25: mol_type = other DNA
gctcagcacagggcaggggtccagg

SEQ ID NO: 32851 - DNA, 25 bp, synthetic construct
  misc_feature 1..25: note = Oligonucleotide
  source 1..25: mol_type = other DNA
tgagctcagcacagggcaggggtcc

SEQ ID NO: 32852 - DNA, 25 bp, synthetic construct
  misc_feature 1..25: note = Oligonucleotide
  source 1..25: mol_type = other DNA
tgctgagctcagcacagggcagggg

SEQ ID NO: 32853 - DNA, 25 bp, synthetic construct
  misc_feature 1..25: note = Oligonucleotide
  source 1..25: mol_type = other DNA
ctctgctgagctcagcacagggcag

SEQ ID NO: 32854 - DNA, 25 bp, synthetic construct
  misc_feature 1..25: note = Oligonucleotide
  source 1..25: mol_type = other DNA
ggcctctgctgagctcagcacaggg

SEQ ID NO: 32855 - DNA, 25 bp, synthetic construct
  misc_feature 1..25: note = Oligonucleotide
  source 1..25: mol_type = other DNA
ctgggcctctgctgagctcagcaca

SEQ ID NO: 32856 - DNA, 25 bp, synthetic construct
  misc_feature 1..25: note = Oligonucleotide
  source 1..25: mol_type = other DNA
tccctgggcctctgctgagctcagc

SEQ ID NO: 32857 - DNA, 25 bp, synthetic construct
  misc_feature 1..25: note = Oligonucleotide
  source 1..25: mol_type = other DNA
gcctccctgggcctctgctgagctc

SEQ ID NO: 32858 - DNA, 25 bp, synthetic construct
  misc_feature 1..25: note = Oligonucleotide
  source 1..25: mol_type = other DNA
cctgcctccctgggcctctgctgag

SEQ ID NO: 32859 - DNA, 25 bp, synthetic construct
  misc_feature 1..25: note = Oligonucleotide
  source 1..25: mol_type = other DNA
gctcctgcctccctgggcctctgct

SEQ ID NO: 32860 - DNA, 25 bp, synthetic construct
  misc_feature 1..25: note = Oligonucleotide
  source 1..25: mol_type = other DNA
gaagctcctgcctccctgggcctct

SEQ ID NO: 32861 - DNA, 25 bp, synthetic construct
  misc_feature 1..25: note = Oligonucleotide
  source 1..25: mol_type = other DNA
ggcgaagctcctgcctccctgggcc

SEQ ID NO: 32862 - DNA, 25 bp, synthetic construct
  misc_feature 1..25: note = Oligonucleotide
  source 1..25: mol_type = other DNA
agtggcgaagctcctgcctccctgg

SEQ ID NO: 32863 - DNA, 25 bp, synthetic construct
  misc_feature 1..25: note = Oligonucleotide
  source 1..25: mol_type = other DNA
gtcagtggcgaagctcctgcctccc

SEQ ID NO: 32864 - DNA, 25 bp, synthetic construct
  misc_feature 1..25: note = Oligonucleotide
  source 1..25: mol_type = other DNA
aaggtcagtggcgaagctcctgcct

SEQ ID NO: 32865 - DNA, 25 bp, synthetic construct
  misc_feature 1..25: note = Oligonucleotide
  source 1..25: mol_type = other DNA
gaaaaggtcagtggcgaagctcctg

SEQ ID NO: 32866 - DNA, 25 bp, synthetic construct
  misc_feature 1..25: note = Oligonucleotide
  source 1..25: mol_type = other DNA
caggaaaaggtcagtggcgaagctc

SEQ ID NO: 32867 - DNA, 25 bp, synthetic construct
  misc_feature 1..25: note = Oligonucleotide
  source 1..25: mol_type = other DNA
gcccaggaaaaggtcagtggcgaag

SEQ ID NO: 32868 - DNA, 25 bp, synthetic construct
  misc_feature 1..25: note = Oligonucleotide
  source 1..25: mol_type = other DNA
ccggcccaggaaaaggtcagtggcg

SEQ ID NO: 32869 - DNA, 25 bp, synthetic construct
  misc_feature 1..25: note = Oligonucleotide
  source 1..25: mol_type = other DNA
gcaccggcccaggaaaaggtcagtg

SEQ ID NO: 32870 - DNA, 25 bp, synthetic construct
  misc_feature 1..25: note = Oligonucleotide
  source 1..25: mol_type = other DNA
agggcaccggcccaggaaaaggtca

SEQ ID NO: 32871 - DNA, 25 bp, synthetic construct
  misc_feature 1..25: note = Oligonucleotide
  source 1..25: mol_type = other DNA
gaaagggcaccggcccaggaaaagg

SEQ ID NO: 32872 - DNA, 25 bp, synthetic construct
  misc_feature 1..25: note = Oligonucleotide
  source 1..25: mol_type = other DNA
gaggaaagggcaccggcccaggaaa

SEQ ID NO: 32873 - DNA, 25 bp, synthetic construct
  misc_feature 1..25: note = Oligonucleotide
  source 1..25: mol_type = other DNA
aaggaggaaagggcaccggcccagg

SEQ ID NO: 32874 - DNA, 25 bp, synthetic construct
  misc_feature 1..25: note = Oligonucleotide
  source 1..25: mol_type = other DNA
aggaaggaggaaagggcaccggccc

SEQ ID NO: 32875 - DNA, 25 bp, synthetic construct
  misc_feature 1..25: note = Oligonucleotide
  source 1..25: mol_type = other DNA
ccaaggaaggaggaaagggcaccgg

SEQ ID NO: 32876 - DNA, 25 bp, synthetic construct
  misc_feature 1..25: note = Oligonucleotide
  source 1..25: mol_type = other DNA
aggccaaggaaggaggaaagggcac

SEQ ID NO: 32877 - DNA, 25 bp, synthetic construct
  misc_feature 1..25: note = Oligonucleotide
  source 1..25: mol_type = other DNA
acaaggccaaggaaggaggaaaggg

SEQ ID NO: 32878 - DNA, 25 bp, synthetic construct
  misc_feature 1..25: note = Oligonucleotide
  source 1..25: mol_type = other DNA
agaacaaggccaaggaaggaggaaa

SEQ ID NO: 32879 - DNA, 25 bp, synthetic construct
  misc_feature 1..25: note = Oligonucleotide
  source 1..25: mol_type = other DNA
ggcagaacaaggccaaggaaggagg

SEQ ID NO: 32880 - DNA, 25 bp, synthetic construct
  misc_feature 1..25: note = Oligonucleotide
  source 1..25: mol_type = other DNA
caaggcagaacaaggccaaggaagg

SEQ ID NO: 32881 - DNA, 25 bp, synthetic construct
  misc_feature 1..25: note = Oligonucleotide
  source 1..25: mol_type = other DNA
gagcaaggcagaacaaggccaagga

SEQ ID NO: 32882 - DNA, 25 bp, synthetic construct
  misc_feature 1..25: note = Oligonucleotide
  source 1..25: mol_type = other DNA
tcagagcaaggcagaacaaggccaa

SEQ ID NO: 32883 - DNA, 25 bp, synthetic construct
  misc_feature 1..25: note = Oligonucleotide
  source 1..25: mol_type = other DNA
cagtcagagcaaggcagaacaaggc

SEQ ID NO: 32884 - DNA, 25 bp, synthetic construct
  misc_feature 1..25: note = Oligonucleotide
  source 1..25: mol_type = other DNA
caccagtcagagcaaggcagaacaa

SEQ ID NO: 32885 - DNA, 25 bp, synthetic construct
  misc_feature 1..25: note = Oligonucleotide
  source 1..25: mol_type = other DNA
agccaccagtcagagcaaggcagaa

SEQ ID NO: 32886 - DNA, 25 bp, synthetic construct
  misc_feature 1..25: note = Oligonucleotide
  source 1..25: mol_type = other DNA
ctaagccaccagtcagagcaaggca

SEQ ID NO: 32887 - DNA, 25 bp, synthetic construct
  misc_feature 1..25: note = Oligonucleotide
  source 1..25: mol_type = other DNA
actctaagccaccagtcagagcaag

SEQ ID NO: 32888 - DNA, 25 bp, synthetic construct
  misc_feature 1..25: note = Oligonucleotide
  source 1..25: mol_type = other DNA
cacactctaagccaccagtcagagc

SEQ ID NO: 32889 - DNA, 25 bp, synthetic construct
  misc_feature 1..25: note = Oligonucleotide
  source 1..25: mol_type = other DNA
ttccacactctaagccaccagtcag

SEQ ID NO: 32890 - DNA, 25 bp, synthetic construct
  misc_feature 1..25: note = Oligonucleotide
  source 1..25: mol_type = other DNA
cccttccacactctaagccaccagt

SEQ ID NO: 32891 - DNA, 25 bp, synthetic construct
  misc_feature 1..25: note = Oligonucleotide
  source 1..25: mol_type = other DNA
agtcccttccacactctaagccacc

SEQ ID NO: 32892 - DNA, 25 bp, synthetic construct
  misc_feature 1..25: note = Oligonucleotide
  source 1..25: mol_type = other DNA
ccaagtcccttccacactctaagcc

SEQ ID NO: 32893 - DNA, 25 bp, synthetic construct
  misc_feature 1..25: note = Oligonucleotide
  source 1..25: mol_type = other DNA
gggccaagtcccttccacactctaa

SEQ ID NO: 32894 - DNA, 25 bp, synthetic construct
  misc_feature 1..25: note = Oligonucleotide
  source 1..25: mol_type = other DNA
agggggccaagtcccttccacactc

SEQ ID NO: 32895 - DNA, 25 bp, synthetic construct
  misc_feature 1..25: note = Oligonucleotide
  source 1..25: mol_type = other DNA
aacagggggccaagtcccttccaca

SEQ ID NO: 32896 - DNA, 25 bp, synthetic construct
  misc_feature 1..25: note = Oligonucleotide
  source 1..25: mol_type = other DNA
gagaacagggggccaagtcccttcc

SEQ ID NO: 32897 - DNA, 25 bp, synthetic construct
  misc_feature 1..25: note = Oligonucleotide
  source 1..25: mol_type = other DNA
gctgagaacagggggccaagtccct

SEQ ID NO: 32898 - DNA, 25 bp, synthetic construct
  misc_feature 1..25: note = Oligonucleotide
  source 1..25: mol_type = other DNA
cgggctgagaacagggggccaagtc

SEQ ID NO: 32899 - DNA, 25 bp, synthetic construct
  misc_feature 1..25: note = Oligonucleotide
  source 1..25: mol_type = other DNA
ccgcgggctgagaacagggggccaa

SEQ ID NO: 32900 - DNA, 25 bp, synthetic construct
  misc_feature 1..25: note = Oligonucleotide
  source 1..25: mol_type = other DNA
cctccgcgggctgagaacagggggc

SEQ ID NO: 32901 - DNA, 25 bp, synthetic construct
  misc_feature 1..25: note = Oligonucleotide
  source 1..25: mol_type = other DNA
caccctccgcgggctgagaacaggg

SEQ ID NO: 32902 - DNA, 25 bp, synthetic construct
  misc_feature 1..25: note = Oligonucleotide
  source 1..25: mol_type = other DNA
atccaccctccgcgggctgagaaca

SEQ ID NO: 32903 - DNA, 25 bp, synthetic construct
  misc_feature 1..25: note = Oligonucleotide
  source 1..25: mol_type = other DNA
cctatccaccctccgcgggctgaga

SEQ ID NO: 32904 - DNA, 25 bp, synthetic construct
  misc_feature 1..25: note = Oligonucleotide
  source 1..25: mol_type = other DNA
tgccctatccaccctccgcgggctg

SEQ ID NO: 32905 - DNA, 25 bp, synthetic construct
  misc_feature 1..25: note = Oligonucleotide
  source 1..25: mol_type = other DNA
ccctgccctatccaccctccgcggg

SEQ ID NO: 32906 - DNA, 25 bp, synthetic construct
  misc_feature 1..25: note = Oligonucleotide
  source 1..25: mol_type = other DNA
ggaccctgccctatccaccctccgc

SEQ ID NO: 32907 - DNA, 25 bp, synthetic construct
  misc_feature 1..25: note = Oligonucleotide
  source 1..25: mol_type = other DNA
tctggaccctgccctatccaccctc

SEQ ID NO: 32908 - DNA, 25 bp, synthetic construct
  misc_feature 1..25: note = Oligonucleotide
  source 1..25: mol_type = other DNA
ccatctggaccctgccctatccacc

SEQ ID NO: 32909 - DNA, 25 bp, synthetic construct
  misc_feature 1..25: note = Oligonucleotide
  source 1..25: mol_type = other DNA
ttcccatctggaccctgccctatcc

SEQ ID NO: 32910 - DNA, 25 bp, synthetic construct
  misc_feature 1..25: note = Oligonucleotide
  source 1..25: mol_type = other DNA
catttcccatctggaccctgcccta

SEQ ID NO: 32911 - DNA, 25 bp, synthetic construct
  misc_feature 1..25: note = Oligonucleotide
  source 1..25: mol_type = other DNA
aaccatttcccatctggaccctgcc

SEQ ID NO: 32912 - DNA, 25 bp, synthetic construct
  misc_feature 1..25: note = Oligonucleotide
  source 1..25: mol_type = other DNA
tgaaaccatttcccatctggaccct

SEQ ID NO: 32913 - DNA, 25 bp, synthetic construct
  misc_feature 1..25: note = Oligonucleotide
  source 1..25: mol_type = other DNA
ctctgaaaccatttcccatctggac

SEQ ID NO: 32914 - DNA, 25 bp, synthetic construct
  misc_feature 1..25: note = Oligonucleotide
  source 1..25: mol_type = other DNA
aatctctgaaaccatttcccatctg

SEQ ID NO: 32915 - DNA, 25 bp, synthetic construct
  misc_feature 1..25: note = Oligonucleotide
  source 1..25: mol_type = other DNA
ccaaatctctgaaaccatttcccat

SEQ ID NO: 32916 - DNA, 25 bp, synthetic construct
  misc_feature 1..25: note = Oligonucleotide
  source 1..25: mol_type = other DNA
ggcccaaatctctgaaaccatttcc

SEQ ID NO: 32917 - DNA, 25 bp, synthetic construct
  misc_feature 1..25: note = Oligonucleotide
  source 1..25: mol_type = other DNA
cagggcccaaatctctgaaaccatt

SEQ ID NO: 32918 - DNA, 25 bp, synthetic construct
  misc_feature 1..25: note = Oligonucleotide
  source 1..25: mol_type = other DNA
aaccagggcccaaatctctgaaacc

SEQ ID NO: 32919 - DNA, 25 bp, synthetic construct
  misc_feature 1..25: note = Oligonucleotide
  source 1..25: mol_type = other DNA
ctgaaccagggcccaaatctctgaa

SEQ ID NO: 32920 - DNA, 25 bp, synthetic construct
  misc_feature 1..25: note = Oligonucleotide
  source 1..25: mol_type = other DNA
tgtctgaaccagggcccaaatctct

SEQ ID NO: 32921 - DNA, 25 bp, synthetic construct
  misc_feature 1..25: note = Oligonucleotide
  source 1..25: mol_type = other DNA
tactgtctgaaccagggcccaaatc

SEQ ID NO: 32922 - DNA, 25 bp, synthetic construct
  misc_feature 1..25: note = Oligonucleotide
  source 1..25: mol_type = other DNA
ccatactgtctgaaccagggcccaa

SEQ ID NO: 32923 - DNA, 25 bp, synthetic construct
  misc_feature 1..25: note = Oligonucleotide
  source 1..25: mol_type = other DNA
ctcccatactgtctgaaccagggcc

SEQ ID NO: 32924 - DNA, 25 bp, synthetic construct
  misc_feature 1..25: note = Oligonucleotide
  source 1..25: mol_type = other DNA
cctctcccatactgtctgaaccagg

SEQ ID NO: 32925 - DNA, 25 bp, synthetic construct
  misc_feature 1..25: note = Oligonucleotide
  source 1..25: mol_type = other DNA
tcccctctcccatactgtctgaacc

SEQ ID NO: 32926 - DNA, 25 bp, synthetic construct
  misc_feature 1..25: note = Oligonucleotide
  source 1..25: mol_type = other DNA
ccctcccctctcccatactgtctga

SEQ ID NO: 32927 - DNA, 25 bp, synthetic construct
  misc_feature 1..25: note = Oligonucleotide
  source 1..25: mol_type = other DNA
ttcccctcccctctcccatactgtc

SEQ ID NO: 32928 - DNA, 25 bp, synthetic construct
  misc_feature 1..25: note = Oligonucleotide
  source 1..25: mol_type = other DNA
tccttcccctcccctctcccatact

SEQ ID NO: 32929 - DNA, 25 bp, synthetic construct
  misc_feature 1..25: note = Oligonucleotide
  source 1..25: mol_type = other DNA
ctctccttcccctcccctctcccat

SEQ ID NO: 32930 - DNA, 25 bp, synthetic construct
  misc_feature 1..25: note = Oligonucleotide
  source 1..25: mol_type = other DNA
tacctctccttcccctcccctctcc

SEQ ID NO: 32931 - DNA, 25 bp, synthetic construct
  misc_feature 1..25: note = Oligonucleotide
  source 1..25: mol_type = other DNA
ccctacctctccttcccctcccctc

SEQ ID NO: 32932 - DNA, 25 bp, synthetic construct
  misc_feature 1..25: note = Oligonucleotide
  source 1..25: mol_type = other DNA
tccccctacctctccttcccctccc

SEQ ID NO: 32933 - DNA, 25 bp, synthetic construct
  misc_feature 1..25: note = Oligonucleotide
  source 1..25: mol_type = other DNA
ggatccccctacctctccttcccct

SEQ ID NO: 32934 - DNA, 25 bp, synthetic construct
  misc_feature 1..25: note = Oligonucleotide
  source 1..25: mol_type = other DNA
tgtggatccccctacctctccttcc

SEQ ID NO: 32935 - DNA, 25 bp, synthetic construct
  misc_feature 1..25: note = Oligonucleotide
  source 1..25: mol_type = other DNA
aggtgtggatccccctacctctcct

SEQ ID NO: 32936 - DNA, 25 bp, synthetic construct
  misc_feature 1..25: note = Oligonucleotide
  source 1..25: mol_type = other DNA
cacaggtgtggatccccctacctct

SEQ ID NO: 32937 - DNA, 25 bp, synthetic construct
  misc_feature 1..25: note = Oligonucleotide
  source 1..25: mol_type = other DNA
cgccacaggtgtggatccccctacc

SEQ ID NO: 32938 - DNA, 25 bp, synthetic construct
  misc_feature 1..25: note = Oligonucleotide
  source 1..25: mol_type = other DNA
tcccgccacaggtgtggatccccct

SEQ ID NO: 32939 - DNA, 25 bp, synthetic construct
  misc_feature 1..25: note = Oligonucleotide
  source 1..25: mol_type = other DNA
cgctcccgccacaggtgtggatccc

SEQ ID NO: 32940 - DNA, 25 bp, synthetic construct
  misc_feature 1..25: note = Oligonucleotide
  source 1..25: mol_type = other DNA
acccgctcccgccacaggtgtggat

SEQ ID NO: 32941 - DNA, 25 bp, synthetic construct
  misc_feature 1..25: note = Oligonucleotide
  source 1..25: mol_type = other DNA
aagacccgctcccgccacaggtgtg

SEQ ID NO: 32942 - DNA, 25 bp, synthetic construct
  misc_feature 1..25: note = Oligonucleotide
  source 1..25: mol_type = other DNA
ctcaagacccgctcccgccacaggt

SEQ ID NO: 32943 - DNA, 25 bp, synthetic construct
  misc_feature 1..25: note = Oligonucleotide
  source 1..25: mol_type = other DNA
gagctcaagacccgctcccgccaca

SEQ ID NO: 32944 - DNA, 25 bp, synthetic construct
  misc_feature 1..25: note = Oligonucleotide
  source 1..25: mol_type = other DNA
ggggagctcaagacccgctcccgcc

SEQ ID NO: 32945 - DNA, 25 bp, synthetic construct
  misc_feature 1..25: note = Oligonucleotide
  source 1..25: mol_type = other DNA
gtgggggagctcaagacccgctccc

SEQ ID NO: 32946 - DNA, 25 bp, synthetic construct
  misc_feature 1..25: note = Oligonucleotide
  source 1..25: mol_type = other DNA
cacgtgggggagctcaagacccgct

SEQ ID NO: 32947 - DNA, 25 bp, synthetic construct
  misc_feature 1..25: note = Oligonucleotide
  source 1..25: mol_type = other DNA
caccacgtgggggagctcaagaccc

SEQ ID NO: 32948 - DNA, 25 bp, synthetic construct
  misc_feature 1..25: note = Oligonucleotide
  source 1..25: mol_type = other DNA
caccaccacgtgggggagctcaaga

SEQ ID NO: 32949 - DNA, 25 bp, synthetic construct
  misc_feature 1..25: note = Oligonucleotide
  source 1..25: mol_type = other DNA
cctcaccaccacgtgggggagctca

SEQ ID NO: 32950 - DNA, 25 bp, synthetic construct
  misc_feature 1..25: note = Oligonucleotide
  source 1..25: mol_type = other DNA
cttcctcaccaccacgtgggggagc

SEQ ID NO: 32951 - DNA, 25 bp, synthetic construct
  misc_feature 1..25: note = Oligonucleotide
  source 1..25: mol_type = other DNA
aaccttcctcaccaccacgtggggg

SEQ ID NO: 32952 - DNA, 25 bp, synthetic construct
  misc_feature 1..25: note = Oligonucleotide
  source 1..25: mol_type = other DNA
cagaaccttcctcaccaccacgtgg

SEQ ID NO: 32953 - DNA, 25 bp, synthetic construct
  misc_feature 1..25: note = Oligonucleotide
  source 1..25: mol_type = other DNA
aaccagaaccttcctcaccaccacg

SEQ ID NO: 32954 - DNA, 25 bp, synthetic construct
  misc_feature 1..25: note = Oligonucleotide
  source 1..25: mol_type = other DNA
tcaaaccagaaccttcctcaccacc

SEQ ID NO: 32955 - DNA, 25 bp, synthetic construct
  misc_feature 1..25: note = Oligonucleotide
  source 1..25: mol_type = other DNA
tcctcaaaccagaaccttcctcacc

SEQ ID NO: 32956 - DNA, 25 bp, synthetic construct
  misc_feature 1..25: note = Oligonucleotide
  source 1..25: mol_type = other DNA
cagtcctcaaaccagaaccttcctc

SEQ ID NO: 32957 - DNA, 25 bp, synthetic construct
  misc_feature 1..25: note = Oligonucleotide
  source 1..25: mol_type = other DNA
acacagtcctcaaaccagaaccttc

SEQ ID NO: 32958 - DNA, 25 bp, synthetic construct
  misc_feature 1..25: note = Oligonucleotide
  source 1..25: mol_type = other DNA
tccacacagtcctcaaaccagaacc

SEQ ID NO: 32959 - DNA, 25 bp, synthetic construct
  misc_feature 1..25: note = Oligonucleotide
  source 1..25: mol_type = other DNA
cactccacacagtcctcaaaccaga

SEQ ID NO: 32960 - DNA, 25 bp, synthetic construct
  misc_feature 1..25: note = Oligonucleotide
  source 1..25: mol_type = other DNA
cctcactccacacagtcctcaaacc

SEQ ID NO: 32961 - DNA, 25 bp, synthetic construct
  misc_feature 1..25: note = Oligonucleotide
  source 1..25: mol_type = other DNA
gcccctcactccacacagtcctcaa

SEQ ID NO: 32962 - DNA, 25 bp, synthetic construct
  misc_feature 1..25: note = Oligonucleotide
  source 1..25: mol_type = other DNA
aatgcccctcactccacacagtcct

SEQ ID NO: 32963 - DNA, 25 bp, synthetic construct
  misc_feature 1..25: note = Oligonucleotide
  source 1..25: mol_type = other DNA
ccaaatgcccctcactccacacagt

SEQ ID NO: 32964 - DNA, 25 bp, synthetic construct
  misc_feature 1..25: note = Oligonucleotide
  source 1..25: mol_type = other DNA
ggtccaaatgcccctcactccacac

SEQ ID NO: 32965 - DNA, 25 bp, synthetic construct
  misc_feature 1..25: note = Oligonucleotide
  source 1..25: mol_type = other DNA
gtaggtccaaatgcccctcactcca

SEQ ID NO: 32966 - DNA, 25 bp, synthetic construct
  misc_feature 1..25: note = Oligonucleotide
  source 1..25: mol_type = other DNA
gacgtaggtccaaatgcccctcact

SEQ ID NO: 32967 - DNA, 25 bp, synthetic construct
  misc_feature 1..25: note = Oligonucleotide
  source 1..25: mol_type = other DNA
tcagacgtaggtccaaatgcccctc

SEQ ID NO: 32968 - DNA, 25 bp, synthetic construct
  misc_feature 1..25: note = Oligonucleotide
  source 1..25: mol_type = other DNA
gcttcagacgtaggtccaaatgccc

SEQ ID NO: 32969 - DNA, 25 bp, synthetic construct
  misc_feature 1..25: note = Oligonucleotide
  source 1..25: mol_type = other DNA
tcagcttcagacgtaggtccaaatg

SEQ ID NO: 32970 - DNA, 25 bp, synthetic construct
  misc_feature 1..25: note = Oligonucleotide
  source 1..25: mol_type = other DNA
ccgtcagcttcagacgtaggtccaa

SEQ ID NO: 32971 - DNA, 25 bp, synthetic construct
  misc_feature 1..25: note = Oligonucleotide
  source 1..25: mol_type = other DNA
tccccgtcagcttcagacgtaggtc

SEQ ID NO: 32972 - DNA, 25 bp, synthetic construct
  misc_feature 1..25: note = Oligonucleotide
  source 1..25: mol_type = other DNA
ccctccccgtcagcttcagacgtag

SEQ ID NO: 32973 - DNA, 25 bp, synthetic construct
  misc_feature 1..25: note = Oligonucleotide
  source 1..25: mol_type = other DNA
cctccctccccgtcagcttcagacg

SEQ ID NO: 32974 - DNA, 25 bp, synthetic construct
  misc_feature 1..25: note = Oligonucleotide
  source 1..25: mol_type = other DNA
ccccctccctccccgtcagcttcag

SEQ ID NO: 32975 - DNA, 25 bp, synthetic construct
  misc_feature 1..25: note = Oligonucleotide
  source 1..25: mol_type = other DNA
aacccccctccctccccgtcagctt

SEQ ID NO: 32976 - DNA, 25 bp, synthetic construct
  misc_feature 1..25: note = Oligonucleotide
  source 1..25: mol_type = other DNA
ctaaacccccctccctccccgtcag

SEQ ID NO: 32977 - DNA, 25 bp, synthetic construct
  misc_feature 1..25: note = Oligonucleotide
  source 1..25: mol_type = other DNA
agcctaaacccccctccctccccgt

SEQ ID NO: 32978 - DNA, 25 bp, synthetic construct
  misc_feature 1..25: note = Oligonucleotide
  source 1..25: mol_type = other DNA
tccagcctaaacccccctccctccc

SEQ ID NO: 32979 - DNA, 25 bp, synthetic construct
  misc_feature 1..25: note = Oligonucleotide
  source 1..25: mol_type = other DNA
gactccagcctaaacccccctccct

SEQ ID NO: 32980 - DNA, 25 bp, synthetic construct
  misc_feature 1..25: note = Oligonucleotide
  source 1..25: mol_type = other DNA
tctgactccagcctaaacccccctc

SEQ ID NO: 32981 - DNA, 25 bp, synthetic construct
  misc_feature 1..25: note = Oligonucleotide
  source 1..25: mol_type = other DNA
aattctgactccagcctaaaccccc

SEQ ID NO: 32982 - DNA, 25 bp, synthetic construct
  misc_feature 1..25: note = Oligonucleotide
  source 1..25: mol_type = other DNA
tccaattctgactccagcctaaacc

SEQ ID NO: 32983 - DNA, 25 bp, synthetic construct
  misc_feature 1..25: note = Oligonucleotide
  source 1..25: mol_type = other DNA
ctctccaattctgactccagcctaa

SEQ ID NO: 32984 - DNA, 25 bp, synthetic construct
  misc_feature 1..25: note = Oligonucleotide
  source 1..25: mol_type = other DNA
ctgctctccaattctgactccagcc

SEQ ID NO: 32985 - DNA, 25 bp, synthetic construct
  misc_feature 1..25: note = Oligonucleotide
  source 1..25: mol_type = other DNA
ttgctgctctccaattctgactcca

SEQ ID NO: 32986 - DNA, 25 bp, synthetic construct
  misc_feature 1..25: note = Oligonucleotide
  source 1..25: mol_type = other DNA
catttgctgctctccaattctgact

SEQ ID NO: 32987 - DNA, 25 bp, synthetic construct
  misc_feature 1..25: note = Oligonucleotide
  source 1..25: mol_type = other DNA
aaacatttgctgctctccaattctg

SEQ ID NO: 32988 - DNA, 25 bp, synthetic construct
  misc_feature 1..25: note = Oligonucleotide
  source 1..25: mol_type = other DNA
aaaaaacatttgctgctctccaatt

SEQ ID NO: 32989 - DNA, 25 bp, synthetic construct
  misc_feature 1..25: note = Oligonucleotide
  source 1..25: mol_type = other DNA
cctaaaaaacatttgctgctctcca

SEQ ID NO: 32990 - DNA, 25 bp, synthetic construct
  misc_feature 1..25: note = Oligonucleotide
  source 1..25: mol_type = other DNA
acacctaaaaaacatttgctgctct

SEQ ID NO: 32991 - DNA, 25 bp, synthetic construct
  misc_feature 1..25: note = Oligonucleotide
  source 1..25: mol_type = other DNA
caaacacctaaaaaacatttgctgc

SEQ ID NO: 32992 - DNA, 25 bp, synthetic construct
  misc_feature 1..25: note = Oligonucleotide
  source 1..25: mol_type = other DNA
tgacaaacacctaaaaaacatttgc

SEQ ID NO: 32993 - DNA, 25 bp, synthetic construct
  misc_feature 1..25: note = Oligonucleotide
  source 1..25: mol_type = other DNA
acatgacaaacacctaaaaaacatt

SEQ ID NO: 32994 - DNA, 25 bp, synthetic construct
  misc_feature 1..25: note = Oligonucleotide
  source 1..25: mol_type = other DNA
agcacatgacaaacacctaaaaaac

SEQ ID NO: 32995 - DNA, 25 bp, synthetic construct
  misc_feature 1..25: note = Oligonucleotide
  source 1..25: mol_type = other DNA
cccagcacatgacaaacacctaaaa

SEQ ID NO: 32996 - DNA, 25 bp, synthetic construct
  misc_feature 1..25: note = Oligonucleotide
  source 1..25: mol_type = other DNA
gggcccagcacatgacaaacaccta

SEQ ID NO: 32997 - DNA, 25 bp, synthetic construct
  misc_feature 1..25: note = Oligonucleotide
  source 1..25: mol_type = other DNA
acagggcccagcacatgacaaacac

SEQ ID NO: 32998 - DNA, 25 bp, synthetic construct
  misc_feature 1..25: note = Oligonucleotide
  source 1..25: mol_type = other DNA
agcacagggcccagcacatgacaaa

SEQ ID NO: 32999 - DNA, 25 bp, synthetic construct
  misc_feature 1..25: note = Oligonucleotide
  source 1..25: mol_type = other DNA
cccagcacagggcccagcacatgac

SEQ ID NO: 33000 - DNA, 25 bp, synthetic construct
  misc_feature 1..25: note = Oligonucleotide
  source 1..25: mol_type = other DNA
gctcccagcacagggcccagcacat

SEQ ID NO: 33001 - DNA, 25 bp, synthetic construct
  misc_feature 1..25: note = Oligonucleotide
  source 1..25: mol_type = other DNA
ccggctcccagcacagggcccagca

SEQ ID NO: 33002 - DNA, 25 bp, synthetic construct
  misc_feature 1..25: note = Oligonucleotide
  source 1..25: mol_type = other DNA
atcccggctcccagcacagggccca

SEQ ID NO: 33003 - DNA, 25 bp, synthetic construct
  misc_feature 1..25: note = Oligonucleotide
  source 1..25: mol_type = other DNA
gtgatcccggctcccagcacagggc

SEQ ID NO: 33004 - DNA, 25 bp, synthetic construct
  misc_feature 1..25: note = Oligonucleotide
  source 1..25: mol_type = other DNA
tccgtgatcccggctcccagcacag

SEQ ID NO: 33005 - DNA, 25 bp, synthetic construct
  misc_feature 1..25: note = Oligonucleotide
  source 1..25: mol_type = other DNA
gcctccgtgatcccggctcccagca

SEQ ID NO: 33006 - DNA, 25 bp, synthetic construct
  misc_feature 1..25: note = Oligonucleotide
  source 1..25: mol_type = other DNA
tgagcctccgtgatcccggctccca

SEQ ID NO: 33007 - DNA, 25 bp, synthetic construct
  misc_feature 1..25: note = Oligonucleotide
  source 1..25: mol_type = other DNA
agctgagcctccgtgatcccggctc

SEQ ID NO: 33008 - DNA, 25 bp, synthetic construct
  misc_feature 1..25: note = Oligonucleotide
  source 1..25: mol_type = other DNA
tccagctgagcctccgtgatcccgg

SEQ ID NO: 33009 - DNA, 25 bp, synthetic construct
  misc_feature 1..25: note = Oligonucleotide
  source 1..25: mol_type = other DNA
gcttccagctgagcctccgtgatcc

SEQ ID NO: 33010 - DNA, 25 bp, synthetic construct
  misc_feature 1..25: note = Oligonucleotide
  source 1..25: mol_type = other DNA
aaggcttccagctgagcctccgtga

SEQ ID NO: 33011 - DNA, 25 bp, synthetic construct
  misc_feature 1..25: note = Oligonucleotide
  source 1..25: mol_type = other DNA
cacaaggcttccagctgagcctccg

SEQ ID NO: 33012 - DNA, 25 bp, synthetic construct
  misc_feature 1..25: note = Oligonucleotide
  source 1..25: mol_type = other DNA
tcccacaaggcttccagctgagcct

SEQ ID NO: 33013 - DNA, 25 bp, synthetic construct
  misc_feature 1..25: note = Oligonucleotide
  source 1..25: mol_type = other DNA
tgctcccacaaggcttccagctgag

SEQ ID NO: 33014 - DNA, 25 bp, synthetic construct
  misc_feature 1..25: note = Oligonucleotide
  source 1..25: mol_type = other DNA
cactgctcccacaaggcttccagct

SEQ ID NO: 33015 - DNA, 25 bp, synthetic construct
  misc_feature 1..25: note = Oligonucleotide
  source 1..25: mol_type = other DNA
agccactgctcccacaaggcttcca

SEQ ID NO: 33016 - DNA, 25 bp, synthetic construct
  misc_feature 1..25: note = Oligonucleotide
  source 1..25: mol_type = other DNA
cacagccactgctcccacaaggctt

SEQ ID NO: 33017 - DNA, 25 bp, synthetic construct
  misc_feature 1..25: note = Oligonucleotide
  source 1..25: mol_type = other DNA
cgtcacagccactgctcccacaagg

SEQ ID NO: 33018 - DNA, 25 bp, synthetic construct
  misc_feature 1..25: note = Oligonucleotide
  source 1..25: mol_type = other DNA
ccccgtcacagccactgctcccaca

SEQ ID NO: 33019 - DNA, 25 bp, synthetic construct
  misc_feature 1..25: note = Oligonucleotide
  source 1..25: mol_type = other DNA
ggcccccgtcacagccactgctccc

SEQ ID NO: 33020 - DNA, 25 bp, synthetic construct
  misc_feature 1..25: note = Oligonucleotide
  source 1..25: mol_type = other DNA
cacggcccccgtcacagccactgct

SEQ ID NO: 33021 - DNA, 25 bp, synthetic construct
  misc_feature 1..25: note = Oligonucleotide
  source 1..25: mol_type = other DNA
tcacacggcccccgtcacagccact

SEQ ID NO: 33022 - DNA, 25 bp, synthetic construct
  misc_feature 1..25: note = Oligonucleotide
  source 1..25: mol_type = other DNA
cgctcacacggcccccgtcacagcc

SEQ ID NO: 33023 - DNA, 25 bp, synthetic construct
  misc_feature 1..25: note = Oligonucleotide
  source 1..25: mol_type = other DNA
ccacgctcacacggcccccgtcaca

SEQ ID NO: 33024 - DNA, 25 bp, synthetic construct
  misc_feature 1..25: note = Oligonucleotide
  source 1..25: mol_type = other DNA
ctcccacgctcacacggcccccgtc

SEQ ID NO: 33025 - DNA, 25 bp, synthetic construct
  misc_feature 1..25: note = Oligonucleotide
  source 1..25: mol_type = other DNA
gagctcccacgctcacacggccccc

SEQ ID NO: 33026 - DNA, 25 bp, synthetic construct
  misc_feature 1..25: note = Oligonucleotide
  source 1..25: mol_type = other DNA
agggagctcccacgctcacacggcc

SEQ ID NO: 33027 - DNA, 25 bp, synthetic construct
  misc_feature 1..25: note = Oligonucleotide
  source 1..25: mol_type = other DNA
cccagggagctcccacgctcacacg

SEQ ID NO: 33028 - DNA, 25 bp, synthetic construct
  misc_feature 1..25: note = Oligonucleotide
  source 1..25: mol_type = other DNA
cagcccagggagctcccacgctcac

SEQ ID NO: 33029 - DNA, 25 bp, synthetic construct
  misc_feature 1..25: note = Oligonucleotide
  source 1..25: mol_type = other DNA
ggccagcccagggagctcccacgct

SEQ ID NO: 33030 - DNA, 25 bp, synthetic construct
  misc_feature 1..25: note = Oligonucleotide
  source 1..25: mol_type = other DNA
tcaggccagcccagggagctcccac

SEQ ID NO: 33031 - DNA, 25 bp, synthetic construct
  misc_feature 1..25: note = Oligonucleotide
  source 1..25: mol_type = other DNA
ccttcaggccagcccagggagctcc

SEQ ID NO: 33032 - DNA, 25 bp, synthetic construct
  misc_feature 1..25: note = Oligonucleotide
  source 1..25: mol_type = other DNA
actccttcaggccagcccagggagc

SEQ ID NO: 33033 - DNA, 25 bp, synthetic construct
  misc_feature 1..25: note = Oligonucleotide
  source 1..25: mol_type = other DNA
ctgactccttcaggccagcccaggg

SEQ ID NO: 33034 - DNA, 25 bp, synthetic construct
  misc_feature 1..25: note = Oligonucleotide
  source 1..25: mol_type = other DNA
tctctgactccttcaggccagccca

SEQ ID NO: 33035 - DNA, 25 bp, synthetic construct
  misc_feature 1..25: note = Oligonucleotide
  source 1..25: mol_type = other DNA
ccctctctgactccttcaggccagc

SEQ ID NO: 33036 - DNA, 25 bp, synthetic construct
  misc_feature 1..25: note = Oligonucleotide
  source 1..25: mol_type = other DNA
aggccctctctgactccttcaggcc

SEQ ID NO: 33037 - DNA, 25 bp, synthetic construct
  misc_feature 1..25: note = Oligonucleotide
  source 1..25: mol_type = other DNA
ttgaggccctctctgactccttcag

SEQ ID NO: 33038 - DNA, 25 bp, synthetic construct
  misc_feature 1..25: note = Oligonucleotide
  source 1..25: mol_type = other DNA
gttttgaggccctctctgactcctt

SEQ ID NO: 33039 - DNA, 25 bp, synthetic construct
  misc_feature 1..25: note = Oligonucleotide
  source 1..25: mol_type = other DNA
tctgttttgaggccctctctgactc

SEQ ID NO: 33040 - DNA, 25 bp, synthetic construct
  misc_feature 1..25: note = Oligonucleotide
  source 1..25: mol_type = other DNA
gcctctgttttgaggccctctctga

SEQ ID NO: 33041 - DNA, 25 bp, synthetic construct
  misc_feature 1..25: note = Oligonucleotide
  source 1..25: mol_type = other DNA
aatgcctctgttttgaggccctctc

SEQ ID NO: 33042 - DNA, 25 bp, synthetic construct
  misc_feature 1..25: note = Oligonucleotide
  source 1..25: mol_type = other DNA
gacaatgcctctgttttgaggccct

SEQ ID NO: 33043 - DNA, 25 bp, synthetic construct
  misc_feature 1..25: note = Oligonucleotide
  source 1..25: mol_type = other DNA
tcagacaatgcctctgttttgaggc

SEQ ID NO: 33044 - DNA, 25 bp, synthetic construct
  misc_feature 1..25: note = Oligonucleotide
  source 1..25: mol_type = other DNA
agctcagacaatgcctctgttttga

SEQ ID NO: 33045 - DNA, 25 bp, synthetic construct
  misc_feature 1..25: note = Oligonucleotide
  source 1..25: mol_type = other DNA
ctcagctcagacaatgcctctgttt

SEQ ID NO: 33046 - DNA, 25 bp, synthetic construct
  misc_feature 1..25: note = Oligonucleotide
  source 1..25: mol_type = other DNA
ggactcagctcagacaatgcctctg

SEQ ID NO: 33047 - DNA, 25 bp, synthetic construct
  misc_feature 1..25: note = Oligonucleotide
  source 1..25: mol_type = other DNA
agaggactcagctcagacaatgcct

SEQ ID NO: 33048 - DNA, 25 bp, synthetic construct
  misc_feature 1..25: note = Oligonucleotide
  source 1..25: mol_type = other DNA
cctagaggactcagctcagacaatg

SEQ ID NO: 33049 - DNA, 25 bp, synthetic construct
  misc_feature 1..25: note = Oligonucleotide
  source 1..25: mol_type = other DNA
ccacctagaggactcagctcagaca

SEQ ID NO: 33050 - DNA, 25 bp, synthetic construct
  misc_feature 1..25: note = Oligonucleotide
  source 1..25: mol_type = other DNA
tgaccacctagaggactcagctcag

SEQ ID NO: 33051 - DNA, 25 bp, synthetic construct
  misc_feature 1..25: note = Oligonucleotide
  source 1..25: mol_type = other DNA
cgctgaccacctagaggactcagct

SEQ ID NO: 33052 - DNA, 25 bp, synthetic construct
  misc_feature 1..25: note = Oligonucleotide
  source 1..25: mol_type = other DNA
agccgctgaccacctagaggactca

SEQ ID NO: 33053 - DNA, 25 bp, synthetic construct
  misc_feature 1..25: note = Oligonucleotide
  source 1..25: mol_type = other DNA
cccagccgctgaccacctagaggac

SEQ ID NO: 33054 - DNA, 25 bp, synthetic construct
  misc_feature 1..25: note = Oligonucleotide
  source 1..25: mol_type = other DNA
agccccagccgctgaccacctagag

SEQ ID NO: 33055 - DNA, 25 bp, synthetic construct
  misc_feature 1..25: note = Oligonucleotide
  source 1..25: mol_type = other DNA
ctcagccccagccgctgaccaccta

SEQ ID NO: 33056 - DNA, 25 bp, synthetic construct
  misc_feature 1..25: note = Oligonucleotide
  source 1..25: mol_type = other DNA
cccctcagccccagccgctgaccac

SEQ ID NO: 33057 - DNA, 25 bp, synthetic construct
  misc_feature 1..25: note = Oligonucleotide
  source 1..25: mol_type = other DNA
tgtcccctcagccccagccgctgac

SEQ ID NO: 33058 - DNA, 25 bp, synthetic construct
  misc_feature 1..25: note = Oligonucleotide
  source 1..25: mol_type = other DNA
ggctgtcccctcagccccagccgct

SEQ ID NO: 33059 - DNA, 25 bp, synthetic construct
  misc_feature 1..25: note = Oligonucleotide
  source 1..25: mol_type = other DNA
cacggctgtcccctcagccccagcc

SEQ ID NO: 33060 - DNA, 25 bp, synthetic construct
  misc_feature 1..25: note = Oligonucleotide
  source 1..25: mol_type = other DNA
acacacggctgtcccctcagcccca

SEQ ID NO: 33061 - DNA, 25 bp, synthetic construct
  misc_feature 1..25: note = Oligonucleotide
  source 1..25: mol_type = other DNA
tgcacacacggctgtcccctcagcc

SEQ ID NO: 33062 - DNA, 25 bp, synthetic construct
  misc_feature 1..25: note = Oligonucleotide
  source 1..25: mol_type = other DNA
ccctgcacacacggctgtcccctca

SEQ ID NO: 33063 - DNA, 25 bp, synthetic construct
  misc_feature 1..25: note = Oligonucleotide
  source 1..25: mol_type = other DNA
ggaccctgcacacacggctgtcccc

SEQ ID NO: 33064 - DNA, 25 bp, synthetic construct
  misc_feature 1..25: note = Oligonucleotide
  source 1..25: mol_type = other DNA
cacggaccctgcacacacggctgtc

SEQ ID NO: 33065 - DNA, 25 bp, synthetic construct
  misc_feature 1..25: note = Oligonucleotide
  source 1..25: mol_type = other DNA
ccacacggaccctgcacacacggct

SEQ ID NO: 33066 - DNA, 25 bp, synthetic construct
  misc_feature 1..25: note = Oligonucleotide
  source 1..25: mol_type = other DNA
gcgccacacggaccctgcacacacg

SEQ ID NO: 33067 - DNA, 25 bp, synthetic construct
  misc_feature 1..25: note = Oligonucleotide
  source 1..25: mol_type = other DNA
agagcgccacacggaccctgcacac

SEQ ID NO: 33068 - DNA, 25 bp, synthetic construct
  misc_feature 1..25: note = Oligonucleotide
  source 1..25: mol_type = other DNA
tgtagagcgccacacggaccctgca

SEQ ID NO: 33069 - DNA, 25 bp, synthetic construct
  misc_feature 1..25: note = Oligonucleotide
  source 1..25: mol_type = other DNA
agctgtagagcgccacacggaccct

SEQ ID NO: 33070 - DNA, 25 bp, synthetic construct
  misc_feature 1..25: note = Oligonucleotide
  source 1..25: mol_type = other DNA
cacagctgtagagcgccacacggac

SEQ ID NO: 33071 - DNA, 25 bp, synthetic construct
  misc_feature 1..25: note = Oligonucleotide
  source 1..25: mol_type = other DNA
acacacagctgtagagcgccacacg

SEQ ID NO: 33072 - DNA, 25 bp, synthetic construct
  misc_feature 1..25: note = Oligonucleotide
  source 1..25: mol_type = other DNA
ctgacacacagctgtagagcgccac

SEQ ID NO: 33073 - DNA, 25 bp, synthetic construct
  misc_feature 1..25: note = Oligonucleotide
  source 1..25: mol_type = other DNA
gtgctgacacacagctgtagagcgc

SEQ ID NO: 33074 - DNA, 25 bp, synthetic construct
  misc_feature 1..25: note = Oligonucleotide
  source 1..25: mol_type = other DNA
gccgtgctgacacacagctgtagag

SEQ ID NO: 33075 - DNA, 25 bp, synthetic construct
  misc_feature 1..25: note = Oligonucleotide
  source 1..25: mol_type = other DNA
caggccgtgctgacacacagctgta

SEQ ID NO: 33076 - DNA, 25 bp, synthetic construct
  misc_feature 1..25: note = Oligonucleotide
  source 1..25: mol_type = other DNA
gagcaggccgtgctgacacacagct

SEQ ID NO: 33077 - DNA, 25 bp, synthetic construct
  misc_feature 1..25: note = Oligonucleotide
  source 1..25: mol_type = other DNA
tcagagcaggccgtgctgacacaca

SEQ ID NO: 33078 - DNA, 25 bp, synthetic construct
  misc_feature 1..25: note = Oligonucleotide
  source 1..25: mol_type = other DNA
cactcagagcaggccgtgctgacac

SEQ ID NO: 33079 - DNA, 25 bp, synthetic construct
  misc_feature 1..25: note = Oligonucleotide
  source 1..25: mol_type = other DNA
aggcactcagagcaggccgtgctga

SEQ ID NO: 33080 - DNA, 25 bp, synthetic construct
  misc_feature 1..25: note = Oligonucleotide
  source 1..25: mol_type = other DNA
gccaggcactcagagcaggccgtgc

SEQ ID NO: 33081 - DNA, 25 bp, synthetic construct
  misc_feature 1..25: note = Oligonucleotide
  source 1..25: mol_type = other DNA
tgtgccaggcactcagagcaggccg

SEQ ID NO: 33082 - DNA, 25 bp, synthetic construct
  misc_feature 1..25: note = Oligonucleotide
  source 1..25: mol_type = other DNA
aactgtgccaggcactcagagcagg

SEQ ID NO: 33083 - DNA, 25 bp, synthetic construct
  misc_feature 1..25: note = Oligonucleotide
  source 1..25: mol_type = other DNA
taaaactgtgccaggcactcagagc

SEQ ID NO: 33084 - DNA, 25 bp, synthetic construct
  misc_feature 1..25: note = Oligonucleotide
  source 1..25: mol_type = other DNA
tgctaaaactgtgccaggcactcag

SEQ ID NO: 33085 - DNA, 25 bp, synthetic construct
  misc_feature 1..25: note = Oligonucleotide
  source 1..25: mol_type = other DNA
aagtgctaaaactgtgccaggcact

SEQ ID NO: 33086 - DNA, 25 bp, synthetic construct
  misc_feature 1..25: note = Oligonucleotide
  source 1..25: mol_type = other DNA
tagaagtgctaaaactgtgccaggc

SEQ ID NO: 33087 - DNA, 25 bp, synthetic construct
  misc_feature 1..25: note = Oligonucleotide
  source 1..25: mol_type = other DNA
gtgtagaagtgctaaaactgtgcca

SEQ ID NO: 33088 - DNA, 25 bp, synthetic construct
  misc_feature 1..25: note = Oligonucleotide
  source 1..25: mol_type = other DNA
tacgtgtagaagtgctaaaactgtg

SEQ ID NO: 33089 - DNA, 25 bp, synthetic construct
  misc_feature 1..25: note = Oligonucleotide
  source 1..25: mol_type = other DNA
ttatacgtgtagaagtgctaaaact

SEQ ID NO: 33090 - DNA, 25 bp, synthetic construct
  misc_feature 1..25: note = Oligonucleotide
  source 1..25: mol_type = other DNA
gacttatacgtgtagaagtgctaaa

SEQ ID NO: 33091 - DNA, 25 bp, synthetic construct
  misc_feature 1..25: note = Oligonucleotide
  source 1..25: mol_type = other DNA
aacgacttatacgtgtagaagtgct

SEQ ID NO: 33092 - DNA, 25 bp, synthetic construct
  misc_feature 1..25: note = Oligonucleotide
  source 1..25: mol_type = other DNA
gtcaacgacttatacgtgtagaagt

SEQ ID NO: 33093 - DNA, 25 bp, synthetic construct
  misc_feature 1..25: note = Oligonucleotide
  source 1..25: mol_type = other DNA
tgagtcaacgacttatacgtgtaga

SEQ ID NO: 33094 - DNA, 25 bp, synthetic construct
  misc_feature 1..25: note = Oligonucleotide
  source 1..25: mol_type = other DNA
ggatgagtcaacgacttatacgtgt

SEQ ID NO: 33095 - DNA, 25 bp, synthetic construct
  misc_feature 1..25: note = Oligonucleotide
  source 1..25: mol_type = other DNA
ctgggatgagtcaacgacttatacg

SEQ ID NO: 33096 - DNA, 25 bp, synthetic construct
  misc_feature 1..25: note = Oligonucleotide
  source 1..25: mol_type = other DNA
ctgctgggatgagtcaacgacttat

SEQ ID NO: 33097 - DNA, 25 bp, synthetic construct
  misc_feature 1..25: note = Oligonucleotide
  source 1..25: mol_type = other DNA
ggactgctgggatgagtcaacgact

SEQ ID NO: 33098 - DNA, 25 bp, synthetic construct
  misc_feature 1..25: note = Oligonucleotide
  source 1..25: mol_type = other DNA
ttgggactgctgggatgagtcaacg

SEQ ID NO: 33099 - DNA, 25 bp, synthetic construct
  misc_feature 1..25: note = Oligonucleotide
  source 1..25: mol_type = other DNA
ctcttgggactgctgggatgagtca

SEQ ID NO: 33100 - DNA, 25 bp, synthetic construct
  misc_feature 1..25: note = Oligonucleotide
  source 1..25: mol_type = other DNA
cacctcttgggactgctgggatgag

SEQ ID NO: 33101 - DNA, 25 bp, synthetic construct
  misc_feature 1..25: note = Oligonucleotide
  source 1..25: mol_type = other DNA
ccccacctcttgggactgctgggat

SEQ ID NO: 33102 - DNA, 25 bp, synthetic construct
  misc_feature 1..25: note = Oligonucleotide
  source 1..25: mol_type = other DNA
tggccccacctcttgggactgctgg

SEQ ID NO: 33103 - DNA, 25 bp, synthetic construct
  misc_feature 1..25: note = Oligonucleotide
  source 1..25: mol_type = other DNA
aagtggccccacctcttgggactgc

SEQ ID NO: 33104 - DNA, 25 bp, synthetic construct
  misc_feature 1..25: note = Oligonucleotide
  source 1..25: mol_type = other DNA
aacaagtggccccacctcttgggac

SEQ ID NO: 33105 - DNA, 25 bp, synthetic construct
  misc_feature 1..25: note = Oligonucleotide
  source 1..25: mol_type = other DNA
aacaacaagtggccccacctcttgg

SEQ ID NO: 33106 - DNA, 25 bp, synthetic construct
  misc_feature 1..25: note = Oligonucleotide
  source 1..25: mol_type = other DNA
aataacaacaagtggccccacctct

SEQ ID NO: 33107 - DNA, 25 bp, synthetic construct
  misc_feature 1..25: note = Oligonucleotide
  source 1..25: mol_type = other DNA
tggaataacaacaagtggccccacc

SEQ ID NO: 33108 - DNA, 25 bp, synthetic construct
  misc_feature 1..25: note = Oligonucleotide
  source 1..25: mol_type = other DNA
aaatggaataacaacaagtggcccc

SEQ ID NO: 33109 - DNA, 25 bp, synthetic construct
  misc_feature 1..25: note = Oligonucleotide
  source 1..25: mol_type = other DNA
tagaaatggaataacaacaagtggc

SEQ ID NO: 33110 - DNA, 25 bp, synthetic construct
  misc_feature 1..25: note = Oligonucleotide
  source 1..25: mol_type = other DNA
ccctagaaatggaataacaacaagt

SEQ ID NO: 33111 - DNA, 25 bp, synthetic construct
  misc_feature 1..25: note = Oligonucleotide
  source 1..25: mol_type = other DNA
accccctagaaatggaataacaaca

SEQ ID NO: 33112 - DNA, 25 bp, synthetic construct
  misc_feature 1..25: note = Oligonucleotide
  source 1..25: mol_type = other DNA
gtgaccccctagaaatggaataaca

SEQ ID NO: 33113 - DNA, 25 bp, synthetic construct
  misc_feature 1..25: note = Oligonucleotide
  source 1..25: mol_type = other DNA
catgtgaccccctagaaatggaata

SEQ ID NO: 33114 - DNA, 25 bp, synthetic construct
  misc_feature 1..25: note = Oligonucleotide
  source 1..25: mol_type = other DNA
ggccatgtgaccccctagaaatgga

SEQ ID NO: 33115 - DNA, 25 bp, synthetic construct
  misc_feature 1..25: note = Oligonucleotide
  source 1..25: mol_type = other DNA
cagggccatgtgaccccctagaaat

SEQ ID NO: 33116 - DNA, 25 bp, synthetic construct
  misc_feature 1..25: note = Oligonucleotide
  source 1..25: mol_type = other DNA
cctcagggccatgtgaccccctaga

SEQ ID NO: 33117 - DNA, 25 bp, synthetic construct
  misc_feature 1..25: note = Oligonucleotide
  source 1..25: mol_type = other DNA
gcccctcagggccatgtgaccccct

SEQ ID NO: 33118 - DNA, 25 bp, synthetic construct
  misc_feature 1..25: note = Oligonucleotide
  source 1..25: mol_type = other DNA
tttgcccctcagggccatgtgaccc

SEQ ID NO: 33119 - DNA, 25 bp, synthetic construct
  misc_feature 1..25: note = Oligonucleotide
  source 1..25: mol_type = other DNA
gactttgcccctcagggccatgtga

SEQ ID NO: 33120 - DNA, 25 bp, synthetic construct
  misc_feature 1..25: note = Oligonucleotide
  source 1..25: mol_type = other DNA
caagactttgcccctcagggccatg

SEQ ID NO: 33121 - DNA, 25 bp, synthetic construct
  misc_feature 1..25: note = Oligonucleotide
  source 1..25: mol_type = other DNA
aaacaagactttgcccctcagggcc

SEQ ID NO: 33122 - DNA, 25 bp, synthetic construct
  misc_feature 1..25: note = Oligonucleotide
  source 1..25: mol_type = other DNA
tgcaaacaagactttgcccctcagg

SEQ ID NO: 33123 - DNA, 25 bp, synthetic construct
  misc_feature 1..25: note = Oligonucleotide
  source 1..25: mol_type = other DNA
tgttgcaaacaagactttgcccctc

SEQ ID NO: 33124 - DNA, 25 bp, synthetic construct
  misc_feature 1..25: note = Oligonucleotide
  source 1..25: mol_type = other DNA
ctgtgttgcaaacaagactttgccc

SEQ ID NO: 33125 - DNA, 25 bp, synthetic construct
  misc_feature 1..25: note = Oligonucleotide
  source 1..25: mol_type = other DNA
tgcctgtgttgcaaacaagactttg

SEQ ID NO: 33126 - DNA, 25 bp, synthetic construct
  misc_feature 1..25: note = Oligonucleotide
  source 1..25: mol_type = other DNA
tgctgcctgtgttgcaaacaagact

SEQ ID NO: 33127 - DNA, 25 bp, synthetic construct
  misc_feature 1..25: note = Oligonucleotide
  source 1..25: mol_type = other DNA
acttgctgcctgtgttgcaaacaag

SEQ ID NO: 33128 - DNA, 25 bp, synthetic construct
  misc_feature 1..25: note = Oligonucleotide
  source 1..25: mol_type = other DNA
agaacttgctgcctgtgttgcaaac

SEQ ID NO: 33129 - DNA, 25 bp, synthetic construct
  misc_feature 1..25: note = Oligonucleotide
  source 1..25: mol_type = other DNA
catagaacttgctgcctgtgttgca

SEQ ID NO: 33130 - DNA, 25 bp, synthetic construct
  misc_feature 1..25: note = Oligonucleotide
  source 1..25: mol_type = other DNA
tcacatagaacttgctgcctgtgtt

SEQ ID NO: 33131 - DNA, 25 bp, synthetic construct
  misc_feature 1..25: note = Oligonucleotide
  source 1..25: mol_type = other DNA
cactcacatagaacttgctgcctgt

SEQ ID NO: 33132 - DNA, 25 bp, synthetic construct
  misc_feature 1..25: note = Oligonucleotide
  source 1..25: mol_type = other DNA
tttcactcacatagaacttgctgcc

SEQ ID NO: 33133 - DNA, 25 bp, synthetic construct
  misc_feature 1..25: note = Oligonucleotide
  source 1..25: mol_type = other DNA
gcgtttcactcacatagaacttgct

SEQ ID NO: 33134 - DNA, 25 bp, synthetic construct
  misc_feature 1..25: note = Oligonucleotide
  source 1..25: mol_type = other DNA
caggcgtttcactcacatagaactt

SEQ ID NO: 33135 - DNA, 25 bp, synthetic construct
  misc_feature 1..25: note = Oligonucleotide
  source 1..25: mol_type = other DNA
atgcaggcgtttcactcacatagaa

SEQ ID NO: 33136 - DNA, 25 bp, synthetic construct
  misc_feature 1..25: note = Oligonucleotide
  source 1..25: mol_type = other DNA
cccatgcaggcgtttcactcacata

SEQ ID NO: 33137 - DNA, 25 bp, synthetic construct
  misc_feature 1..25: note = Oligonucleotide
  source 1..25: mol_type = other DNA
caccccatgcaggcgtttcactcac

SEQ ID NO: 33138 - DNA, 25 bp, synthetic construct
  misc_feature 1..25: note = Oligonucleotide
  source 1..25: mol_type = other DNA
cctcaccccatgcaggcgtttcact

SEQ ID NO: 33139 - DNA, 25 bp, synthetic construct
  misc_feature 1..25: note = Oligonucleotide
  source 1..25: mol_type = other DNA
gcccctcaccccatgcaggcgtttc

SEQ ID NO: 33140 - DNA, 25 bp, synthetic construct
  misc_feature 1..25: note = Oligonucleotide
  source 1..25: mol_type = other DNA
ctcgcccctcaccccatgcaggcgt

SEQ ID NO: 33141 - DNA, 25 bp, synthetic construct
  misc_feature 1..25: note = Oligonucleotide
  source 1..25: mol_type = other DNA
agcctcgcccctcaccccatgcagg

SEQ ID NO: 33142 - DNA, 25 bp, synthetic construct
  misc_feature 1..25: note = Oligonucleotide
  source 1..25: mol_type = other DNA
accagcctcgcccctcaccccatgc

SEQ ID NO: 33143 - DNA, 25 bp, synthetic construct
  misc_feature 1..25: note = Oligonucleotide
  source 1..25: mol_type = other DNA
cacaccagcctcgcccctcacccca

SEQ ID NO: 33144 - DNA, 25 bp, synthetic construct
  misc_feature 1..25: note = Oligonucleotide
  source 1..25: mol_type = other DNA
ccccacaccagcctcgcccctcacc

SEQ ID NO: 33145 - DNA, 25 bp, synthetic construct
  misc_feature 1..25: note = Oligonucleotide
  source 1..25: mol_type = other DNA
ggtccccacaccagcctcgcccctc

SEQ ID NO: 33146 - DNA, 25 bp, synthetic construct
  misc_feature 1..25: note = Oligonucleotide
  source 1..25: mol_type = other DNA
cgtggtccccacaccagcctcgccc

SEQ ID NO: 33147 - DNA, 25 bp, synthetic construct
  misc_feature 1..25: note = Oligonucleotide
  source 1..25: mol_type = other DNA
ccccgtggtccccacaccagcctcg

SEQ ID NO: 33148 - DNA, 25 bp, synthetic construct
  misc_feature 1..25: note = Oligonucleotide
  source 1..25: mol_type = other DNA
ccaccccgtggtccccacaccagcc

SEQ ID NO: 33149 - DNA, 25 bp, synthetic construct
  misc_feature 1..25: note = Oligonucleotide
  source 1..25: mol_type = other DNA
tgaccaccccgtggtccccacacca

SEQ ID NO: 33150 - DNA, 25 bp, synthetic construct
  misc_feature 1..25: note = Oligonucleotide
  source 1..25: mol_type = other DNA
acctgaccaccccgtggtccccaca

SEQ ID NO: 33151 - DNA, 25 bp, synthetic construct
  misc_feature 1..25: note = Oligonucleotide
  source 1..25: mol_type = other DNA
gccacctgaccaccccgtggtcccc

SEQ ID NO: 33152 - DNA, 25 bp, synthetic construct
  misc_feature 1..25: note = Oligonucleotide
  source 1..25: mol_type = other DNA
catgccacctgaccaccccgtggtc

SEQ ID NO: 33153 - DNA, 25 bp, synthetic construct
  misc_feature 1..25: note = Oligonucleotide
  source 1..25: mol_type = other DNA
ctccatgccacctgaccaccccgtg

SEQ ID NO: 33154 - DNA, 25 bp, synthetic construct
  misc_feature 1..25: note = Oligonucleotide
  source 1..25: mol_type = other DNA
tgactccatgccacctgaccacccc

SEQ ID NO: 33155 - DNA, 25 bp, synthetic construct
  misc_feature 1..25: note = Oligonucleotide
  source 1..25: mol_type = other DNA
acttgactccatgccacctgaccac

SEQ ID NO: 33156 - DNA, 25 bp, synthetic construct
  misc_feature 1..25: note = Oligonucleotide
  source 1..25: mol_type = other DNA
gtcacttgactccatgccacctgac

SEQ ID NO: 33157 - DNA, 25 bp, synthetic construct
  misc_feature 1..25: note = Oligonucleotide
  source 1..25: mol_type = other DNA
actgtcacttgactccatgccacct

SEQ ID NO: 33158 - DNA, 25 bp, synthetic construct
  misc_feature 1..25: note = Oligonucleotide
  source 1..25: mol_type = other DNA
cacactgtcacttgactccatgcca

SEQ ID NO: 33159 - DNA, 25 bp, synthetic construct
  misc_feature 1..25: note = Oligonucleotide
  source 1..25: mol_type = other DNA
tgccacactgtcacttgactccatg

SEQ ID NO: 33160 - DNA, 25 bp, synthetic construct
  misc_feature 1..25: note = Oligonucleotide
  source 1..25: mol_type = other DNA
tgatgccacactgtcacttgactcc

SEQ ID NO: 33161 - DNA, 25 bp, synthetic construct
  misc_feature 1..25: note = Oligonucleotide
  source 1..25: mol_type = other DNA
ccatgatgccacactgtcacttgac

SEQ ID NO: 33162 - DNA, 25 bp, synthetic construct
  misc_feature 1..25: note = Oligonucleotide
  source 1..25: mol_type = other DNA
ccgccatgatgccacactgtcactt

SEQ ID NO: 33163 - DNA, 25 bp, synthetic construct
  misc_feature 1..25: note = Oligonucleotide
  source 1..25: mol_type = other DNA
cctccgccatgatgccacactgtca

SEQ ID NO: 33164 - DNA, 25 bp, synthetic construct
  misc_feature 1..25: note = Oligonucleotide
  source 1..25: mol_type = other DNA
ttccctccgccatgatgccacactg

SEQ ID NO: 33165 - DNA, 25 bp, synthetic construct
  misc_feature 1..25: note = Oligonucleotide
  source 1..25: mol_type = other DNA
gggttccctccgccatgatgccaca

SEQ ID NO: 33166 - DNA, 25 bp, synthetic construct
  misc_feature 1..25: note = Oligonucleotide
  source 1..25: mol_type = other DNA
gctgggttccctccgccatgatgcc

SEQ ID NO: 33167 - DNA, 25 bp, synthetic construct
  misc_feature 1..25: note = Oligonucleotide
  source 1..25: mol_type = other DNA
gcggctgggttccctccgccatgat

SEQ ID NO: 33168 - DNA, 25 bp, synthetic construct
  misc_feature 1..25: note = Oligonucleotide
  source 1..25: mol_type = other DNA
actgcggctgggttccctccgccat

SEQ ID NO: 33169 - DNA, 25 bp, synthetic construct
  misc_feature 1..25: note = Oligonucleotide
  source 1..25: mol_type = other DNA
gacactgcggctgggttccctccgc

SEQ ID NO: 33170 - DNA, 25 bp, synthetic construct
  misc_feature 1..25: note = Oligonucleotide
  source 1..25: mol_type = other DNA
tcagacactgcggctgggttccctc

SEQ ID NO: 33171 - DNA, 25 bp, synthetic construct
  misc_feature 1..25: note = Oligonucleotide
  source 1..25: mol_type = other DNA
caatcagacactgcggctgggttcc

SEQ ID NO: 33172 - DNA, 25 bp, synthetic construct
  misc_feature 1..25: note = Oligonucleotide
  source 1..25: mol_type = other DNA
gcacaatcagacactgcggctgggt

SEQ ID NO: 33173 - DNA, 25 bp, synthetic construct
  misc_feature 1..25: note = Oligonucleotide
  source 1..25: mol_type = other DNA
cctgcacaatcagacactgcggctg

SEQ ID NO: 33174 - DNA, 25 bp, synthetic construct
  misc_feature 1..25: note = Oligonucleotide
  source 1..25: mol_type = other DNA
caacctgcacaatcagacactgcgg

SEQ ID NO: 33175 - DNA, 25 bp, synthetic construct
  misc_feature 1..25: note = Oligonucleotide
  source 1..25: mol_type = other DNA
acacaacctgcacaatcagacactg

SEQ ID NO: 33176 - DNA, 25 bp, synthetic construct
  misc_feature 1..25: note = Oligonucleotide
  source 1..25: mol_type = other DNA
cctacacaacctgcacaatcagaca

SEQ ID NO: 33177 - DNA, 25 bp, synthetic construct
  misc_feature 1..25: note = Oligonucleotide
  source 1..25: mol_type = other DNA
gatcctacacaacctgcacaatcag

SEQ ID NO: 33178 - DNA, 25 bp, synthetic construct
  misc_feature 1..25: note = Oligonucleotide
  source 1..25: mol_type = other DNA
tttgatcctacacaacctgcacaat

SEQ ID NO: 33179 - DNA, 25 bp, synthetic construct
  misc_feature 1..25: note = Oligonucleotide
  source 1..25: mol_type = other DNA
ggctttgatcctacacaacctgcac

SEQ ID NO: 33180 - DNA, 25 bp, synthetic construct
  misc_feature 1..25: note = Oligonucleotide
  source 1..25: mol_type = other DNA
ccgggctttgatcctacacaacctg

SEQ ID NO: 33181 - DNA, 25 bp, synthetic construct
  misc_feature 1..25: note = Oligonucleotide
  source 1..25: mol_type = other DNA
agcccgggctttgatcctacacaac

SEQ ID NO: 33182 - DNA, 25 bp, synthetic construct
  misc_feature 1..25: note = Oligonucleotide
  source 1..25: mol_type = other DNA
cccagcccgggctttgatcctacac

SEQ ID NO: 33183 - DNA, 25 bp, synthetic construct
  misc_feature 1..25: note = Oligonucleotide
  source 1..25: mol_type = other DNA
ctgcccagcccgggctttgatccta

SEQ ID NO: 33184 - DNA, 25 bp, synthetic construct
  misc_feature 1..25: note = Oligonucleotide
  source 1..25: mol_type = other DNA
gctctgcccagcccgggctttgatc

SEQ ID NO: 33185 - DNA, 25 bp, synthetic construct
  misc_feature 1..25: note = Oligonucleotide
  source 1..25: mol_type = other DNA
tctgctctgcccagcccgggctttg

SEQ ID NO: 33186 - DNA, 25 bp, synthetic construct
  misc_feature 1..25: note = Oligonucleotide
  source 1..25: mol_type = other DNA
tgctctgctctgcccagcccgggct

SEQ ID NO: 33187 - DNA, 25 bp, synthetic construct
  misc_feature 1..25: note = Oligonucleotide
  source 1..25: mol_type = other DNA
cattgctctgctctgcccagcccgg

SEQ ID NO: 33188 - DNA, 25 bp, synthetic construct
  misc_feature 1..25: note = Oligonucleotide
  source 1..25: mol_type = other DNA
ctccattgctctgctctgcccagcc

SEQ ID NO: 33189 - DNA, 25 bp, synthetic construct
  misc_feature 1..25: note = Oligonucleotide
  source 1..25: mol_type = other DNA
cctctccattgctctgctctgccca

SEQ ID NO: 33190 - DNA, 25 bp, synthetic construct
  misc_feature 1..25: note = Oligonucleotide
  source 1..25: mol_type = other DNA
cctcctctccattgctctgctctgc

SEQ ID NO: 33191 - DNA, 25 bp, synthetic construct
  misc_feature 1..25: note = Oligonucleotide
  source 1..25: mol_type = other DNA
aaccctcctctccattgctctgctc

SEQ ID NO: 33192 - DNA, 25 bp, synthetic construct
  misc_feature 1..25: note = Oligonucleotide
  source 1..25: mol_type = other DNA
ctgaaccctcctctccattgctctg

SEQ ID NO: 33193 - DNA, 25 bp, synthetic construct
  misc_feature 1..25: note = Oligonucleotide
  source 1..25: mol_type = other DNA
gacctgaaccctcctctccattgct

SEQ ID NO: 33194 - DNA, 25 bp, synthetic construct
  misc_feature 1..25: note = Oligonucleotide
  source 1..25: mol_type = other DNA
ccagacctgaaccctcctctccatt

SEQ ID NO: 33195 - DNA, 25 bp, synthetic construct
  misc_feature 1..25: note = Oligonucleotide
  source 1..25: mol_type = other DNA
agcccagacctgaaccctcctctcc

SEQ ID NO: 33196 - DNA, 25 bp, synthetic construct
  misc_feature 1..25: note = Oligonucleotide
  source 1..25: mol_type = other DNA
tggagcccagacctgaaccctcctc

SEQ ID NO: 33197 - DNA, 25 bp, synthetic construct
  misc_feature 1..25: note = Oligonucleotide
  source 1..25: mol_type = other DNA
ggctggagcccagacctgaaccctc

SEQ ID NO: 33198 - DNA, 25 bp, synthetic construct
  misc_feature 1..25: note = Oligonucleotide
  source 1..25: mol_type = other DNA
gctggctggagcccagacctgaacc

SEQ ID NO: 33199 - DNA, 25 bp, synthetic construct
  misc_feature 1..25: note = Oligonucleotide
  source 1..25: mol_type = other DNA
gctgctggctggagcccagacctga

SEQ ID NO: 33200 - DNA, 25 bp, synthetic construct
  misc_feature 1..25: note = Oligonucleotide
  source 1..25: mol_type = other DNA
atggctgctggctggagcccagacc

SEQ ID NO: 33201 - DNA, 25 bp, synthetic construct
  misc_feature 1..25: note = Oligonucleotide
  source 1..25: mol_type = other DNA
accatggctgctggctggagcccag

SEQ ID NO: 33202 - DNA, 25 bp, synthetic construct
  misc_feature 1..25: note = Oligonucleotide
  source 1..25: mol_type = other DNA
cacaccatggctgctggctggagcc

SEQ ID NO: 33203 - DNA, 25 bp, synthetic construct
  misc_feature 1..25: note = Oligonucleotide
  source 1..25: mol_type = other DNA
acacacaccatggctgctggctgga

SEQ ID NO: 33204 - DNA, 25 bp, synthetic construct
  misc_feature 1..25: note = Oligonucleotide
  source 1..25: mol_type = other DNA
gtcacacacaccatggctgctggct

SEQ ID NO: 33205 - DNA, 25 bp, synthetic construct
  misc_feature 1..25: note = Oligonucleotide
  source 1..25: mol_type = other DNA
caggtcacacacaccatggctgctg

SEQ ID NO: 33206 - DNA, 25 bp, synthetic construct
  misc_feature 1..25: note = Oligonucleotide
  source 1..25: mol_type = other DNA
ccccaggtcacacacaccatggctg

SEQ ID NO: 33207 - DNA, 25 bp, synthetic construct
  misc_feature 1..25: note = Oligonucleotide
  source 1..25: mol_type = other DNA
actccccaggtcacacacaccatgg

SEQ ID NO: 33208 - DNA, 25 bp, synthetic construct
  misc_feature 1..25: note = Oligonucleotide
  source 1..25: mol_type = other DNA
ctcactccccaggtcacacacacca

SEQ ID NO: 33209 - DNA, 25 bp, synthetic construct
  misc_feature 1..25: note = Oligonucleotide
  source 1..25: mol_type = other DNA
acactcactccccaggtcacacaca

SEQ ID NO: 33210 - DNA, 25 bp, synthetic construct
  misc_feature 1..25: note = Oligonucleotide
  source 1..25: mol_type = other DNA
ctgacactcactccccaggtcacac

SEQ ID NO: 33211 - DNA, 25 bp, synthetic construct
  misc_feature 1..25: note = Oligonucleotide
  source 1..25: mol_type = other DNA
cctctgacactcactccccaggtca

SEQ ID NO: 33212 - DNA, 25 bp, synthetic construct
  misc_feature 1..25: note = Oligonucleotide
  source 1..25: mol_type = other DNA
ggacctctgacactcactccccagg

SEQ ID NO: 33213 - DNA, 25 bp, synthetic construct
  misc_feature 1..25: note = Oligonucleotide
  source 1..25: mol_type = other DNA
ccgggacctctgacactcactcccc

SEQ ID NO: 33214 - DNA, 25 bp, synthetic construct
  misc_feature 1..25: note = Oligonucleotide
  source 1..25: mol_type = other DNA
accccgggacctctgacactcactc

SEQ ID NO: 33215 - DNA, 25 bp, synthetic construct
  misc_feature 1..25: note = Oligonucleotide
  source 1..25: mol_type = other DNA
tctaccccgggacctctgacactca

SEQ ID NO: 33216 - DNA, 25 bp, synthetic construct
  misc_feature 1..25: note = Oligonucleotide
  source 1..25: mol_type = other DNA
ccgtctaccccgggacctctgacac

SEQ ID NO: 33217 - DNA, 25 bp, synthetic construct
  misc_feature 1..25: note = Oligonucleotide
  source 1..25: mol_type = other DNA
ctcccgtctaccccgggacctctga

SEQ ID NO: 33218 - DNA, 25 bp, synthetic construct
  misc_feature 1..25: note = Oligonucleotide
  source 1..25: mol_type = other DNA
atactcccgtctaccccgggacctc

SEQ ID NO: 33219 - DNA, 25 bp, synthetic construct
  misc_feature 1..25: note = Oligonucleotide
  source 1..25: mol_type = other DNA
gaaatactcccgtctaccccgggac

SEQ ID NO: 33220 - DNA, 25 bp, synthetic construct
  misc_feature 1..25: note = Oligonucleotide
  source 1..25: mol_type = other DNA
catgaaatactcccgtctaccccgg

SEQ ID NO: 33221 - DNA, 25 bp, synthetic construct
  misc_feature 1..25: note = Oligonucleotide
  source 1..25: mol_type = other DNA
actcatgaaatactcccgtctaccc

SEQ ID NO: 33222 - DNA, 25 bp, synthetic construct
  misc_feature 1..25: note = Oligonucleotide
  source 1..25: mol_type = other DNA
cccactcatgaaatactcccgtcta

SEQ ID NO: 33223 - DNA, 25 bp, synthetic construct
  misc_feature 1..25: note = Oligonucleotide
  source 1..25: mol_type = other DNA
ctgcccactcatgaaatactcccgt

SEQ ID NO: 33224 - DNA, 25 bp, synthetic construct
  misc_feature 1..25: note = Oligonucleotide
  source 1..25: mol_type = other DNA
ccgctgcccactcatgaaatactcc

SEQ ID NO: 33225 - DNA, 25 bp, synthetic construct
  misc_feature 1..25: note = Oligonucleotide
  source 1..25: mol_type = other DNA
ctcccgctgcccactcatgaaatac

SEQ ID NO: 33226 - DNA, 25 bp, synthetic construct
  misc_feature 1..25: note = Oligonucleotide
  source 1..25: mol_type = other DNA
cctctcccgctgcccactcatgaaa

SEQ ID NO: 33227 - DNA, 25 bp, synthetic construct
  misc_feature 1..25: note = Oligonucleotide
  source 1..25: mol_type = other DNA
gtccctctcccgctgcccactcatg

SEQ ID NO: 33228 - DNA, 25 bp, synthetic construct
  misc_feature 1..25: note = Oligonucleotide
  source 1..25: mol_type = other DNA
caggtccctctcccgctgcccactc

SEQ ID NO: 33229 - DNA, 25 bp, synthetic construct
  misc_feature 1..25: note = Oligonucleotide
  source 1..25: mol_type = other DNA
ccgcaggtccctctcccgctgccca

SEQ ID NO: 33230 - DNA, 25 bp, synthetic construct
  misc_feature 1..25: note = Oligonucleotide
  source 1..25: mol_type = other DNA
cctccgcaggtccctctcccgctgc

SEQ ID NO: 33231 - DNA, 25 bp, synthetic construct
  misc_feature 1..25: note = Oligonucleotide
  source 1..25: mol_type = other DNA
cagcctccgcaggtccctctcccgc

SEQ ID NO: 33232 - DNA, 25 bp, synthetic construct
  misc_feature 1..25: note = Oligonucleotide
  source 1..25: mol_type = other DNA
aggcagcctccgcaggtccctctcc

SEQ ID NO: 33233 - DNA, 25 bp, synthetic construct
  misc_feature 1..25: note = Oligonucleotide
  source 1..25: mol_type = other DNA
cgcaggcagcctccgcaggtccctc

SEQ ID NO: 33234 - DNA, 25 bp, synthetic construct
  misc_feature 1..25: note = Oligonucleotide
  source 1..25: mol_type = other DNA
cttcgcaggcagcctccgcaggtcc

SEQ ID NO: 33235 - DNA, 25 bp, synthetic construct
  misc_feature 1..25: note = Oligonucleotide
  source 1..25: mol_type = other DNA
gcccttcgcaggcagcctccgcagg

SEQ ID NO: 33236 - DNA, 25 bp, synthetic construct
  misc_feature 1..25: note = Oligonucleotide
  source 1..25: mol_type = other DNA
cctgcccttcgcaggcagcctccgc

SEQ ID NO: 33237 - DNA, 25 bp, synthetic construct
  misc_feature 1..25: note = Oligonucleotide
  source 1..25: mol_type = other DNA
ctccctgcccttcgcaggcagcctc

SEQ ID NO: 33238 - DNA, 25 bp, synthetic construct
  misc_feature 1..25: note = Oligonucleotide
  source 1..25: mol_type = other DNA
ccactccctgcccttcgcaggcagc

SEQ ID NO: 33239 - DNA, 25 bp, synthetic construct
  misc_feature 1..25: note = Oligonucleotide
  source 1..25: mol_type = other DNA
ctcccactccctgcccttcgcaggc

SEQ ID NO: 33240 - DNA, 25 bp, synthetic construct
  misc_feature 1..25: note = Oligonucleotide
  source 1..25: mol_type = other DNA
ctgctcccactccctgcccttcgca

SEQ ID NO: 33241 - DNA, 25 bp, synthetic construct
  misc_feature 1..25: note = Oligonucleotide
  source 1..25: mol_type = other DNA
tcactgctcccactccctgcccttc

SEQ ID NO: 33242 - DNA, 25 bp, synthetic construct
  misc_feature 1..25: note = Oligonucleotide
  source 1..25: mol_type = other DNA
ctgtcactgctcccactccctgccc

SEQ ID NO: 33243 - DNA, 25 bp, synthetic construct
  misc_feature 1..25: note = Oligonucleotide
  source 1..25: mol_type = other DNA
gcactgtcactgctcccactccctg

SEQ ID NO: 33244 - DNA, 25 bp, synthetic construct
  misc_feature 1..25: note = Oligonucleotide
  source 1..25: mol_type = other DNA
agggcactgtcactgctcccactcc

SEQ ID NO: 33245 - DNA, 25 bp, synthetic construct
  misc_feature 1..25: note = Oligonucleotide
  source 1..25: mol_type = other DNA
cagagggcactgtcactgctcccac

SEQ ID NO: 33246 - DNA, 25 bp, synthetic construct
  misc_feature 1..25: note = Oligonucleotide
  source 1..25: mol_type = other DNA
ggtcagagggcactgtcactgctcc

SEQ ID NO: 33247 - DNA, 25 bp, synthetic construct
  misc_feature 1..25: note = Oligonucleotide
  source 1..25: mol_type = other DNA
caaggtcagagggcactgtcactgc

SEQ ID NO: 33248 - DNA, 25 bp, synthetic construct
  misc_feature 1..25: note = Oligonucleotide
  source 1..25: mol_type = other DNA
agccaaggtcagagggcactgtcac

SEQ ID NO: 33249 - DNA, 25 bp, synthetic construct
  misc_feature 1..25: note = Oligonucleotide
  source 1..25: mol_type = other DNA
tgcagccaaggtcagagggcactgt

SEQ ID NO: 33250 - DNA, 25 bp, synthetic construct
  misc_feature 1..25: note = Oligonucleotide
  source 1..25: mol_type = other DNA
gcctgcagccaaggtcagagggcac

SEQ ID NO: 33251 - DNA, 25 bp, synthetic construct
  misc_feature 1..25: note = Oligonucleotide
  source 1..25: mol_type = other DNA
agggcctgcagccaaggtcagaggg

SEQ ID NO: 33252 - DNA, 25 bp, synthetic construct
  misc_feature 1..25: note = Oligonucleotide
  source 1..25: mol_type = other DNA
agcagggcctgcagccaaggtcaga

SEQ ID NO: 33253 - DNA, 25 bp, synthetic construct
  misc_feature 1..25: note = Oligonucleotide
  source 1..25: mol_type = other DNA
gccagcagggcctgcagccaaggtc

SEQ ID NO: 33254 - DNA, 25 bp, synthetic construct
  misc_feature 1..25: note = Oligonucleotide
  source 1..25: mol_type = other DNA
gtggccagcagggcctgcagccaag

SEQ ID NO: 33255 - DNA, 25 bp, synthetic construct
  misc_feature 1..25: note = Oligonucleotide
  source 1..25: mol_type = other DNA
agtgtggccagcagggcctgcagcc

SEQ ID NO: 33256 - DNA, 25 bp, synthetic construct
  misc_feature 1..25: note = Oligonucleotide
  source 1..25: mol_type = other DNA
cgcagtgtggccagcagggcctgca

SEQ ID NO: 33257 - DNA, 25 bp, synthetic construct
  misc_feature 1..25: note = Oligonucleotide
  source 1..25: mol_type = other DNA
ctgcgcagtgtggccagcagggcct

SEQ ID NO: 33258 - DNA, 25 bp, synthetic construct
  misc_feature 1..25: note = Oligonucleotide
  source 1..25: mol_type = other DNA
gctctgcgcagtgtggccagcaggg

SEQ ID NO: 33259 - DNA, 25 bp, synthetic construct
  misc_feature 1..25: note = Oligonucleotide
  source 1..25: mol_type = other DNA
gaggctctgcgcagtgtggccagca

SEQ ID NO: 33260 - DNA, 25 bp, synthetic construct
  misc_feature 1..25: note = Oligonucleotide
  source 1..25: mol_type = other DNA
gcagaggctctgcgcagtgtggcca

SEQ ID NO: 33261 - DNA, 25 bp, synthetic construct
  misc_feature 1..25: note = Oligonucleotide
  source 1..25: mol_type = other DNA
agagcagaggctctgcgcagtgtgg

SEQ ID NO: 33262 - DNA, 25 bp, synthetic construct
  misc_feature 1..25: note = Oligonucleotide
  source 1..25: mol_type = other DNA
cccagagcagaggctctgcgcagtg

SEQ ID NO: 33263 - DNA, 25 bp, synthetic construct
  misc_feature 1..25: note = Oligonucleotide
  source 1..25: mol_type = other DNA
gatcccagagcagaggctctgcgca

SEQ ID NO: 33264 - DNA, 25 bp, synthetic construct
  misc_feature 1..25: note = Oligonucleotide
  source 1..25: mol_type = other DNA
cgggatcccagagcagaggctctgc

SEQ ID NO: 33265 - DNA, 25 bp, synthetic construct
  misc_feature 1..25: note = Oligonucleotide
  source 1..25: mol_type = other DNA
ccccgggatcccagagcagaggctc

SEQ ID NO: 33266 - DNA, 25 bp, synthetic construct
  misc_feature 1..25: note = Oligonucleotide
  source 1..25: mol_type = other DNA
cggccccgggatcccagagcagagg

SEQ ID NO: 33267 - DNA, 25 bp, synthetic construct
  misc_feature 1..25: note = Oligonucleotide
  source 1..25: mol_type = other DNA
actcggccccgggatcccagagcag

SEQ ID NO: 33268 - DNA, 25 bp, synthetic construct
  misc_feature 1..25: note = Oligonucleotide
  source 1..25: mol_type = other DNA
agaactcggccccgggatcccagag

SEQ ID NO: 33269 - DNA, 25 bp, synthetic construct
  misc_feature 1..25: note = Oligonucleotide
  source 1..25: mol_type = other DNA
ggcagaactcggccccgggatccca

SEQ ID NO: 33270 - DNA, 25 bp, synthetic construct
  misc_feature 1..25: note = Oligonucleotide
  source 1..25: mol_type = other DNA
tctggcagaactcggccccgggatc

SEQ ID NO: 33271 - DNA, 25 bp, synthetic construct
  misc_feature 1..25: note = Oligonucleotide
  source 1..25: mol_type = other DNA
gcctctggcagaactcggccccggg

SEQ ID NO: 33272 - DNA, 25 bp, synthetic construct
  misc_feature 1..25: note = Oligonucleotide
  source 1..25: mol_type = other DNA
ctggcctctggcagaactcggcccc

SEQ ID NO: 33273 - DNA, 25 bp, synthetic construct
  misc_feature 1..25: note = Oligonucleotide
  source 1..25: mol_type = other DNA
actctggcctctggcagaactcggc

SEQ ID NO: 33274 - DNA, 25 bp, synthetic construct
  misc_feature 1..25: note = Oligonucleotide
  source 1..25: mol_type = other DNA
tgcactctggcctctggcagaactc

SEQ ID NO: 33275 - DNA, 25 bp, synthetic construct
  misc_feature 1..25: note = Oligonucleotide
  source 1..25: mol_type = other DNA
ggctgcactctggcctctggcagaa

SEQ ID NO: 33276 - DNA, 25 bp, synthetic construct
  misc_feature 1..25: note = Oligonucleotide
  source 1..25: mol_type = other DNA
ctgggctgcactctggcctctggca

SEQ ID NO: 33277 - DNA, 25 bp, synthetic construct
  misc_feature 1..25: note = Oligonucleotide
  source 1..25: mol_type = other DNA
ttcctgggctgcactctggcctctg

SEQ ID NO: 33278 - DNA, 25 bp, synthetic construct
  misc_feature 1..25: note = Oligonucleotide
  source 1..25: mol_type = other DNA
ctgttcctgggctgcactctggcct

SEQ ID NO: 33279 - DNA, 25 bp, synthetic construct
  misc_feature 1..25: note = Oligonucleotide
  source 1..25: mol_type = other DNA
ttcctgttcctgggctgcactctgg

SEQ ID NO: 33280 - DNA, 25 bp, synthetic construct
  misc_feature 1..25: note = Oligonucleotide
  source 1..25: mol_type = other DNA
aggttcctgttcctgggctgcactc

SEQ ID NO: 33281 - DNA, 25 bp, synthetic construct
  misc_feature 1..25: note = Oligonucleotide
  source 1..25: mol_type = other DNA
agcaggttcctgttcctgggctgca

SEQ ID NO: 33282 - DNA, 25 bp, synthetic construct
  misc_feature 1..25: note = Oligonucleotide
  source 1..25: mol_type = other DNA
ggaagcaggttcctgttcctgggct

SEQ ID NO: 33283 - DNA, 25 bp, synthetic construct
  misc_feature 1..25: note = Oligonucleotide
  source 1..25: mol_type = other DNA
gttggaagcaggttcctgttcctgg

SEQ ID NO: 33284 - DNA, 25 bp, synthetic construct
  misc_feature 1..25: note = Oligonucleotide
  source 1..25: mol_type = other DNA
cctgttggaagcaggttcctgttcc

SEQ ID NO: 33285 - DNA, 25 bp, synthetic construct
  misc_feature 1..25: note = Oligonucleotide
  source 1..25: mol_type = other DNA
gggcctgttggaagcaggttcctgt

SEQ ID NO: 33286 - DNA, 25 bp, synthetic construct
  misc_feature 1..25: note = Oligonucleotide
  source 1..25: mol_type = other DNA
tctgggcctgttggaagcaggttcc

SEQ ID NO: 33287 - DNA, 25 bp, synthetic construct
  misc_feature 1..25: note = Oligonucleotide
  source 1..25: mol_type = other DNA
agatctgggcctgttggaagcaggt

SEQ ID NO: 33288 - DNA, 25 bp, synthetic construct
  misc_feature 1..25: note = Oligonucleotide
  source 1..25: mol_type = other DNA
agcagatctgggcctgttggaagca

SEQ ID NO: 33289 - DNA, 25 bp, synthetic construct
  misc_feature 1..25: note = Oligonucleotide
  source 1..25: mol_type = other DNA
gggagcagatctgggcctgttggaa

SEQ ID NO: 33290 - DNA, 25 bp, synthetic construct
  misc_feature 1..25: note = Oligonucleotide
  source 1..25: mol_type = other DNA
ggggggagcagatctgggcctgttg

SEQ ID NO: 33291 - DNA, 25 bp, synthetic construct
  misc_feature 1..25: note = Oligonucleotide
  source 1..25: mol_type = other DNA
ggtggggggagcagatctgggcctg

SEQ ID NO: 33292 - DNA, 25 bp, synthetic construct
  misc_feature 1..25: note = Oligonucleotide
  source 1..25: mol_type = other DNA
gggggtggggggagcagatctgggc

SEQ ID NO: 33293 - DNA, 25 bp, synthetic construct
  misc_feature 1..25: note = Oligonucleotide
  source 1..25: mol_type = other DNA
ttggggggtggggggagcagatctg

SEQ ID NO: 33294 - DNA, 25 bp, synthetic construct
  misc_feature 1..25: note = Oligonucleotide
  source 1..25: mol_type = other DNA
tttttggggggtggggggagcagat

SEQ ID NO: 33295 - DNA, 25 bp, synthetic construct
  misc_feature 1..25: note = Oligonucleotide
  source 1..25: mol_type = other DNA
atttttttggggggtggggggagca

SEQ ID NO: 33296 - DNA, 25 bp, synthetic construct
  misc_feature 1..25: note = Oligonucleotide
  source 1..25: mol_type = other DNA
tggatttttttggggggtgggggga

SEQ ID NO: 33297 - DNA, 25 bp, synthetic construct
  misc_feature 1..25: note = Oligonucleotide
  source 1..25: mol_type = other DNA
aaatggatttttttggggggtgggg

SEQ ID NO: 33298 - DNA, 25 bp, synthetic construct
  misc_feature 1..25: note = Oligonucleotide
  source 1..25: mol_type = other DNA
cggaaatggatttttttggggggtg

SEQ ID NO: 33299 - DNA, 25 bp, synthetic construct
  misc_feature 1..25: note = Oligonucleotide
  source 1..25: mol_type = other DNA
tcccggaaatggatttttttggggg

SEQ ID NO: 33300 - DNA, 25 bp, synthetic construct
  misc_feature 1..25: note = Oligonucleotide
  source 1..25: mol_type = other DNA
cagtcccggaaatggatttttttgg

SEQ ID NO: 33301 - DNA, 25 bp, synthetic construct
  misc_feature 1..25: note = Oligonucleotide
  source 1..25: mol_type = other DNA
ctccagtcccggaaatggatttttt

SEQ ID NO: 33302 - DNA, 25 bp, synthetic construct
  misc_feature 1..25: note = Oligonucleotide
  source 1..25: mol_type = other DNA
ccactccagtcccggaaatggattt

SEQ ID NO: 33303 - DNA, 25 bp, synthetic construct
  misc_feature 1..25: note = Oligonucleotide
  source 1..25: mol_type = other DNA
tccccactccagtcccggaaatgga

SEQ ID NO: 33304 - DNA, 25 bp, synthetic construct
  misc_feature 1..25: note = Oligonucleotide
  source 1..25: mol_type = other DNA
ctgtccccactccagtcccggaaat

SEQ ID NO: 33305 - DNA, 25 bp, synthetic construct
  misc_feature 1..25: note = Oligonucleotide
  source 1..25: mol_type = other DNA
tttctgtccccactccagtcccgga

SEQ ID NO: 33306 - DNA, 25 bp, synthetic construct
  misc_feature 1..25: note = Oligonucleotide
  source 1..25: mol_type = other DNA
ccttttctgtccccactccagtccc

SEQ ID NO: 33307 - DNA, 25 bp, synthetic construct
  misc_feature 1..25: note = Oligonucleotide
  source 1..25: mol_type = other DNA
agtccttttctgtccccactccagt

SEQ ID NO: 33308 - DNA, 25 bp, synthetic construct
  misc_feature 1..25: note = Oligonucleotide
  source 1..25: mol_type = other DNA
ttaagtccttttctgtccccactcc

SEQ ID NO: 33309 - DNA, 25 bp, synthetic construct
  misc_feature 1..25: note = Oligonucleotide
  source 1..25: mol_type = other DNA
cctttaagtccttttctgtccccac

SEQ ID NO: 33310 - DNA, 25 bp, synthetic construct
  misc_feature 1..25: note = Oligonucleotide
  source 1..25: mol_type = other DNA
taacctttaagtccttttctgtccc

SEQ ID NO: 33311 - DNA, 25 bp, synthetic construct
  misc_feature 1..25: note = Oligonucleotide
  source 1..25: mol_type = other DNA
ccctaacctttaagtccttttctgt

SEQ ID NO: 33312 - DNA, 25 bp, synthetic construct
  misc_feature 1..25: note = Oligonucleotide
  source 1..25: mol_type = other DNA
cctccctaacctttaagtccttttc

SEQ ID NO: 33313 - DNA, 25 bp, synthetic construct
  misc_feature 1..25: note = Oligonucleotide
  source 1..25: mol_type = other DNA
tcccctccctaacctttaagtcctt

SEQ ID NO: 33314 - DNA, 25 bp, synthetic construct
  misc_feature 1..25: note = Oligonucleotide
  source 1..25: mol_type = other DNA
atgtcccctccctaacctttaagtc

SEQ ID NO: 33315 - DNA, 25 bp, synthetic construct
  misc_feature 1..25: note = Oligonucleotide
  source 1..25: mol_type = other DNA
actatgtcccctccctaacctttaa

SEQ ID NO: 33316 - DNA, 25 bp, synthetic construct
  misc_feature 1..25: note = Oligonucleotide
  source 1..25: mol_type = other DNA
gggactatgtcccctccctaacctt

SEQ ID NO: 33317 - DNA, 25 bp, synthetic construct
  misc_feature 1..25: note = Oligonucleotide
  source 1..25: mol_type = other DNA
acagggactatgtcccctccctaac

SEQ ID NO: 33318 - DNA, 25 bp, synthetic construct
  misc_feature 1..25: note = Oligonucleotide
  source 1..25: mol_type = other DNA
cgcacagggactatgtcccctccct

SEQ ID NO: 33319 - DNA, 25 bp, synthetic construct
  misc_feature 1..25: note = Oligonucleotide
  source 1..25: mol_type = other DNA
gcacgcacagggactatgtcccctc

SEQ ID NO: 33320 - DNA, 25 bp, synthetic construct
  misc_feature 1..25: note = Oligonucleotide
  source 1..25: mol_type = other DNA
cctgcacgcacagggactatgtccc

SEQ ID NO: 33321 - DNA, 25 bp, synthetic construct
  misc_feature 1..25: note = Oligonucleotide
  source 1..25: mol_type = other DNA
gcccctgcacgcacagggactatgt

SEQ ID NO: 33322 - DNA, 25 bp, synthetic construct
  misc_feature 1..25: note = Oligonucleotide
  source 1..25: mol_type = other DNA
ccagcccctgcacgcacagggacta

SEQ ID NO: 33323 - DNA, 25 bp, synthetic construct
  misc_feature 1..25: note = Oligonucleotide
  source 1..25: mol_type = other DNA
gcaccagcccctgcacgcacaggga

SEQ ID NO: 33324 - DNA, 25 bp, synthetic construct
  misc_feature 1..25: note = Oligonucleotide
  source 1..25: mol_type = other DNA
tgggcaccagcccctgcacgcacag

SEQ ID NO: 33325 - DNA, 25 bp, synthetic construct
  misc_feature 1..25: note = Oligonucleotide
  source 1..25: mol_type = other DNA
ctctgggcaccagcccctgcacgca

SEQ ID NO: 33326 - DNA, 25 bp, synthetic construct
  misc_feature 1..25: note = Oligonucleotide
  source 1..25: mol_type = other DNA
cggctctgggcaccagcccctgcac

SEQ ID NO: 33327 - DNA, 25 bp, synthetic construct
  misc_feature 1..25: note = Oligonucleotide
  source 1..25: mol_type = other DNA
caccggctctgggcaccagcccctg

SEQ ID NO: 33328 - DNA, 25 bp, synthetic construct
  misc_feature 1..25: note = Oligonucleotide
  source 1..25: mol_type = other DNA
aggcaccggctctgggcaccagccc

SEQ ID NO: 33329 - DNA, 25 bp, synthetic construct
  misc_feature 1..25: note = Oligonucleotide
  source 1..25: mol_type = other DNA
agcaggcaccggctctgggcaccag

SEQ ID NO: 33330 - DNA, 25 bp, synthetic construct
  misc_feature 1..25: note = Oligonucleotide
  source 1..25: mol_type = other DNA
cacagcaggcaccggctctgggcac

SEQ ID NO: 33331 - DNA, 25 bp, synthetic construct
  misc_feature 1..25: note = Oligonucleotide
  source 1..25: mol_type = other DNA
tcccacagcaggcaccggctctggg

SEQ ID NO: 33332 - DNA, 25 bp, synthetic construct
  misc_feature 1..25: note = Oligonucleotide
  source 1..25: mol_type = other DNA
cgatcccacagcaggcaccggctct

SEQ ID NO: 33333 - DNA, 25 bp, synthetic construct
  misc_feature 1..25: note = Oligonucleotide
  source 1..25: mol_type = other DNA
tcccgatcccacagcaggcaccggc

SEQ ID NO: 33334 - DNA, 25 bp, synthetic construct
  misc_feature 1..25: note = Oligonucleotide
  source 1..25: mol_type = other DNA
gcctcccgatcccacagcaggcacc

SEQ ID NO: 33335 - DNA, 25 bp, synthetic construct
  misc_feature 1..25: note = Oligonucleotide
  source 1..25: mol_type = other DNA
ctcgcctcccgatcccacagcaggc

SEQ ID NO: 33336 - DNA, 25 bp, synthetic construct
  misc_feature 1..25: note = Oligonucleotide
  source 1..25: mol_type = other DNA
ggactcgcctcccgatcccacagca

SEQ ID NO: 33337 - DNA, 25 bp, synthetic construct
  misc_feature 1..25: note = Oligonucleotide
  source 1..25: mol_type = other DNA
ccaggactcgcctcccgatcccaca

SEQ ID NO: 33338 - DNA, 25 bp, synthetic construct
  misc_feature 1..25: note = Oligonucleotide
  source 1..25: mol_type = other DNA
tgaccaggactcgcctcccgatccc

SEQ ID NO: 33339 - DNA, 25 bp, synthetic construct
  misc_feature 1..25: note = Oligonucleotide
  source 1..25: mol_type = other DNA
aagtgaccaggactcgcctcccgat

SEQ ID NO: 33340 - DNA, 25 bp, synthetic construct
  misc_feature 1..25: note = Oligonucleotide
  source 1..25: mol_type = other DNA
ggtaagtgaccaggactcgcctccc

SEQ ID NO: 33341 - DNA, 25 bp, synthetic construct
  misc_feature 1..25: note = Oligonucleotide
  source 1..25: mol_type = other DNA
ctgggtaagtgaccaggactcgcct

SEQ ID NO: 33342 - DNA, 25 bp, synthetic construct
  misc_feature 1..25: note = Oligonucleotide
  source 1..25: mol_type = other DNA
ctgctgggtaagtgaccaggactcg

SEQ ID NO: 33343 - DNA, 25 bp, synthetic construct
  misc_feature 1..25: note = Oligonucleotide
  source 1..25: mol_type = other DNA
tctctgctgggtaagtgaccaggac

SEQ ID NO: 33344 - DNA, 25 bp, synthetic construct
  misc_feature 1..25: note = Oligonucleotide
  source 1..25: mol_type = other DNA
tgctctctgctgggtaagtgaccag

SEQ ID NO: 33345 - DNA, 25 bp, synthetic construct
  misc_feature 1..25: note = Oligonucleotide
  source 1..25: mol_type = other DNA
gactgctctctgctgggtaagtgac

SEQ ID NO: 33346 - DNA, 25 bp, synthetic construct
  misc_feature 1..25: note = Oligonucleotide
  source 1..25: mol_type = other DNA
ggagactgctctctgctgggtaagt

SEQ ID NO: 33347 - DNA, 25 bp, synthetic construct
  misc_feature 1..25: note = Oligonucleotide
  source 1..25: mol_type = other DNA
gtgggagactgctctctgctgggta

SEQ ID NO: 33348 - DNA, 25 bp, synthetic construct
  misc_feature 1..25: note = Oligonucleotide
  source 1..25: mol_type = other DNA
gccgtgggagactgctctctgctgg

SEQ ID NO: 33349 - DNA, 25 bp, synthetic construct
  misc_feature 1..25: note = Oligonucleotide
  source 1..25: mol_type = other DNA
ggtgccgtgggagactgctctctgc

SEQ ID NO: 33350 - DNA, 25 bp, synthetic construct
  misc_feature 1..25: note = Oligonucleotide
  source 1..25: mol_type = other DNA
ggaggtgccgtgggagactgctctc

SEQ ID NO: 33351 - DNA, 25 bp, synthetic construct
  misc_feature 1..25: note = Oligonucleotide
  source 1..25: mol_type = other DNA
ccaggaggtgccgtgggagactgct

SEQ ID NO: 33352 - DNA, 25 bp, synthetic construct
  misc_feature 1..25: note = Oligonucleotide
  source 1..25: mol_type = other DNA
ctgccaggaggtgccgtgggagact

SEQ ID NO: 33353 - DNA, 25 bp, synthetic construct
  misc_feature 1..25: note = Oligonucleotide
  source 1..25: mol_type = other DNA
tgcctgccaggaggtgccgtgggag

SEQ ID NO: 33354 - DNA, 25 bp, synthetic construct
  misc_feature 1..25: note = Oligonucleotide
  source 1..25: mol_type = other DNA
ctctgcctgccaggaggtgccgtgg

SEQ ID NO: 33355 - DNA, 25 bp, synthetic construct
  misc_feature 1..25: note = Oligonucleotide
  source 1..25: mol_type = other DNA
accctctgcctgccaggaggtgccg

SEQ ID NO: 33356 - DNA, 25 bp, synthetic construct
  misc_feature 1..25: note = Oligonucleotide
  source 1..25: mol_type = other DNA
tccaccctctgcctgccaggaggtg

SEQ ID NO: 33357 - DNA, 25 bp, synthetic construct
  misc_feature 1..25: note = Oligonucleotide
  source 1..25: mol_type = other DNA
agctccaccctctgcctgccaggag

SEQ ID NO: 33358 - DNA, 25 bp, synthetic construct
  misc_feature 1..25: note = Oligonucleotide
  source 1..25: mol_type = other DNA
cacagctccaccctctgcctgccag

SEQ ID NO: 33359 - DNA, 25 bp, synthetic construct
  misc_feature 1..25: note = Oligonucleotide
  source 1..25: mol_type = other DNA
cctcacagctccaccctctgcctgc

SEQ ID NO: 33360 - DNA, 25 bp, synthetic construct
  misc_feature 1..25: note = Oligonucleotide
  source 1..25: mol_type = other DNA
ctccctcacagctccaccctctgcc

SEQ ID NO: 33361 - DNA, 25 bp, synthetic construct
  misc_feature 1..25: note = Oligonucleotide
  source 1..25: mol_type = other DNA
tccctccctcacagctccaccctct

SEQ ID NO: 33362 - DNA, 25 bp, synthetic construct
  misc_feature 1..25: note = Oligonucleotide
  source 1..25: mol_type = other DNA
cattccctccctcacagctccaccc

SEQ ID NO: 33363 - DNA, 25 bp, synthetic construct
  misc_feature 1..25: note = Oligonucleotide
  source 1..25: mol_type = other DNA
ctccattccctccctcacagctcca

SEQ ID NO: 33364 - DNA, 25 bp, synthetic construct
  misc_feature 1..25: note = Oligonucleotide
  source 1..25: mol_type = other DNA
cttctccattccctccctcacagct

SEQ ID NO: 33365 - DNA, 25 bp, synthetic construct
  misc_feature 1..25: note = Oligonucleotide
  source 1..25: mol_type = other DNA
tcgcttctccattccctccctcaca

SEQ ID NO: 33366 - DNA, 25 bp, synthetic construct
  misc_feature 1..25: note = Oligonucleotide
  source 1..25: mol_type = other DNA
acctcgcttctccattccctccctc

SEQ ID NO: 33367 - DNA, 25 bp, synthetic construct
  misc_feature 1..25: note = Oligonucleotide
  source 1..25: mol_type = other DNA
ctgacctcgcttctccattccctcc

SEQ ID NO: 33368 - DNA, 25 bp, synthetic construct
  misc_feature 1..25: note = Oligonucleotide
  source 1..25: mol_type = other DNA
cacctgacctcgcttctccattccc

SEQ ID NO: 33369 - DNA, 25 bp, synthetic construct
  misc_feature 1..25: note = Oligonucleotide
  source 1..25: mol_type = other DNA
acacacctgacctcgcttctccatt

SEQ ID NO: 33370 - DNA, 25 bp, synthetic construct
  misc_feature 1..25: note = Oligonucleotide
  source 1..25: mol_type = other DNA
agaacacacctgacctcgcttctcc

SEQ ID NO: 33371 - DNA, 25 bp, synthetic construct
  misc_feature 1..25: note = Oligonucleotide
  source 1..25: mol_type = other DNA
tccagaacacacctgacctcgcttc

SEQ ID NO: 33372 - DNA, 25 bp, synthetic construct
  misc_feature 1..25: note = Oligonucleotide
  source 1..25: mol_type = other DNA
gcctccagaacacacctgacctcgc

SEQ ID NO: 33373 - DNA, 25 bp, synthetic construct
  misc_feature 1..25: note = Oligonucleotide
  source 1..25: mol_type = other DNA
tgggcctccagaacacacctgacct

SEQ ID NO: 33374 - DNA, 25 bp, synthetic construct
  misc_feature 1..25: note = Oligonucleotide
  source 1..25: mol_type = other DNA
tgctgggcctccagaacacacctga

SEQ ID NO: 33375 - DNA, 25 bp, synthetic construct
  misc_feature 1..25: note = Oligonucleotide
  source 1..25: mol_type = other DNA
tcctgctgggcctccagaacacacc

SEQ ID NO: 33376 - DNA, 25 bp, synthetic construct
  misc_feature 1..25: note = Oligonucleotide
  source 1..25: mol_type = other DNA
tgctcctgctgggcctccagaacac

SEQ ID NO: 33377 - DNA, 25 bp, synthetic construct
  misc_feature 1..25: note = Oligonucleotide
  source 1..25: mol_type = other DNA
gcctgctcctgctgggcctccagaa

SEQ ID NO: 33378 - DNA, 25 bp, synthetic construct
  misc_feature 1..25: note = Oligonucleotide
  source 1..25: mol_type = other DNA
agggcctgctcctgctgggcctcca

SEQ ID NO: 33379 - DNA, 25 bp, synthetic construct
  misc_feature 1..25: note = Oligonucleotide
  source 1..25: mol_type = other DNA
cacagggcctgctcctgctgggcct

SEQ ID NO: 33380 - DNA, 25 bp, synthetic construct
  misc_feature 1..25: note = Oligonucleotide
  source 1..25: mol_type = other DNA
aggcacagggcctgctcctgctggg

SEQ ID NO: 33381 - DNA, 25 bp, synthetic construct
  misc_feature 1..25: note = Oligonucleotide
  source 1..25: mol_type = other DNA
ggaaggcacagggcctgctcctgct

SEQ ID NO: 33382 - DNA, 25 bp, synthetic construct
  misc_feature 1..25: note = Oligonucleotide
  source 1..25: mol_type = other DNA
gagggaaggcacagggcctgctcct

SEQ ID NO: 33383 - DNA, 25 bp, synthetic construct
  misc_feature 1..25: note = Oligonucleotide
  source 1..25: mol_type = other DNA
ggggagggaaggcacagggcctgct

SEQ ID NO: 33384 - DNA, 25 bp, synthetic construct
  misc_feature 1..25: note = Oligonucleotide
  source 1..25: mol_type = other DNA
ggaggggagggaaggcacagggcct

SEQ ID NO: 33385 - DNA, 25 bp, synthetic construct
  misc_feature 1..25: note = Oligonucleotide
  source 1..25: mol_type = other DNA
gagggaggggagggaaggcacaggg

SEQ ID NO: 33386 - DNA, 25 bp, synthetic construct
  misc_feature 1..25: note = Oligonucleotide
  source 1..25: mol_type = other DNA
aaggagggaggggagggaaggcaca

SEQ ID NO: 33387 - DNA, 25 bp, synthetic construct
  misc_feature 1..25: note = Oligonucleotide
  source 1..25: mol_type = other DNA
gggaaggagggaggggagggaaggc

SEQ ID NO: 33388 - DNA, 25 bp, synthetic construct
  misc_feature 1..25: note = Oligonucleotide
  source 1..25: mol_type = other DNA
aaagggaaggagggaggggagggaa

SEQ ID NO: 33389 - DNA, 25 bp, synthetic construct
  misc_feature 1..25: note = Oligonucleotide
  source 1..25: mol_type = other DNA
aagaaagggaaggagggaggggagg

SEQ ID NO: 33390 - DNA, 25 bp, synthetic construct
  misc_feature 1..25: note = Oligonucleotide
  source 1..25: mol_type = other DNA
gcaaagaaagggaaggagggagggg

SEQ ID NO: 33391 - DNA, 25 bp, synthetic construct
  misc_feature 1..25: note = Oligonucleotide
  source 1..25: mol_type = other DNA
actgcaaagaaagggaaggagggag

SEQ ID NO: 33392 - DNA, 25 bp, synthetic construct
  misc_feature 1..25: note = Oligonucleotide
  source 1..25: mol_type = other DNA
cttactgcaaagaaagggaaggagg

SEQ ID NO: 33393 - DNA, 25 bp, synthetic construct
  misc_feature 1..25: note = Oligonucleotide
  source 1..25: mol_type = other DNA
gaccttactgcaaagaaagggaagg

SEQ ID NO: 33394 - DNA, 25 bp, synthetic construct
  misc_feature 1..25: note = Oligonucleotide
  source 1..25: mol_type = other DNA
gctgaccttactgcaaagaaaggga

SEQ ID NO: 33395 - DNA, 25 bp, synthetic construct
  misc_feature 1..25: note = Oligonucleotide
  source 1..25: mol_type = other DNA
agtgctgaccttactgcaaagaaag

SEQ ID NO: 33396 - DNA, 25 bp, synthetic construct
  misc_feature 1..25: note = Oligonucleotide
  source 1..25: mol_type = other DNA
ccaagtgctgaccttactgcaaaga

SEQ ID NO: 33397 - DNA, 25 bp, synthetic construct
  misc_feature 1..25: note = Oligonucleotide
  source 1..25: mol_type = other DNA
cacccaagtgctgaccttactgcaa

SEQ ID NO: 33398 - DNA, 25 bp, synthetic construct
  misc_feature 1..25: note = Oligonucleotide
  source 1..25: mol_type = other DNA
acccacccaagtgctgaccttactg

SEQ ID NO: 33399 - DNA, 25 bp, synthetic construct
  misc_feature 1..25: note = Oligonucleotide
  source 1..25: mol_type = other DNA
actacccacccaagtgctgacctta

SEQ ID NO: 33400 - DNA, 25 bp, synthetic construct
  misc_feature 1..25: note = Oligonucleotide
  source 1..25: mol_type = other DNA
cctactacccacccaagtgctgacc

SEQ ID NO: 33401 - DNA, 25 bp, synthetic construct
  misc_feature 1..25: note = Oligonucleotide
  source 1..25: mol_type = other DNA
tctcctactacccacccaagtgctg

SEQ ID NO: 33402 - DNA, 25 bp, synthetic construct
  misc_feature 1..25: note = Oligonucleotide
  source 1..25: mol_type = other DNA
ccatctcctactacccacccaagtg

SEQ ID NO: 33403 - DNA, 25 bp, synthetic construct
  misc_feature 1..25: note = Oligonucleotide
  source 1..25: mol_type = other DNA
cagccatctcctactacccacccaa

SEQ ID NO: 33404 - DNA, 25 bp, synthetic construct
  misc_feature 1..25: note = Oligonucleotide
  source 1..25: mol_type = other DNA
acacagccatctcctactacccacc

SEQ ID NO: 33405 - DNA, 25 bp, synthetic construct
  misc_feature 1..25: note = Oligonucleotide
  source 1..25: mol_type = other DNA
ccaacacagccatctcctactaccc

SEQ ID NO: 33406 - DNA, 25 bp, synthetic construct
  misc_feature 1..25: note = Oligonucleotide
  source 1..25: mol_type = other DNA
tgcccaacacagccatctcctacta

SEQ ID NO: 33407 - DNA, 25 bp, synthetic construct
  misc_feature 1..25: note = Oligonucleotide
  source 1..25: mol_type = other DNA
aaatgcccaacacagccatctccta

SEQ ID NO: 33408 - DNA, 25 bp, synthetic construct
  misc_feature 1..25: note = Oligonucleotide
  source 1..25: mol_type = other DNA
agaaaatgcccaacacagccatctc

SEQ ID NO: 33409 - DNA, 25 bp, synthetic construct
  misc_feature 1..25: note = Oligonucleotide
  source 1..25: mol_type = other DNA
aagagaaaatgcccaacacagccat

SEQ ID NO: 33410 - DNA, 25 bp, synthetic construct
  misc_feature 1..25: note = Oligonucleotide
  source 1..25: mol_type = other DNA
ctgaagagaaaatgcccaacacagc

SEQ ID NO: 33411 - DNA, 25 bp, synthetic construct
  misc_feature 1..25: note = Oligonucleotide
  source 1..25: mol_type = other DNA
cagctgaagagaaaatgcccaacac

SEQ ID NO: 33412 - DNA, 25 bp, synthetic construct
  misc_feature 1..25: note = Oligonucleotide
  source 1..25: mol_type = other DNA
agccagctgaagagaaaatgcccaa

SEQ ID NO: 33413 - DNA, 25 bp, synthetic construct
  misc_feature 1..25: note = Oligonucleotide
  source 1..25: mol_type = other DNA
aaaagccagctgaagagaaaatgcc

SEQ ID NO: 33414 - DNA, 25 bp, synthetic construct
  misc_feature 1..25: note = Oligonucleotide
  source 1..25: mol_type = other DNA
cataaaagccagctgaagagaaaat

SEQ ID NO: 33415 - DNA, 25 bp, synthetic construct
  misc_feature 1..25: note = Oligonucleotide
  source 1..25: mol_type = other DNA
acacataaaagccagctgaagagaa

SEQ ID NO: 33416 - DNA, 25 bp, synthetic construct
  misc_feature 1..25: note = Oligonucleotide
  source 1..25: mol_type = other DNA
aagacacataaaagccagctgaaga

SEQ ID NO: 33417 - DNA, 25 bp, synthetic construct
  misc_feature 1..25: note = Oligonucleotide
  source 1..25: mol_type = other DNA
aataagacacataaaagccagctga

SEQ ID NO: 33418 - DNA, 25 bp, synthetic construct
  misc_feature 1..25: note = Oligonucleotide
  source 1..25: mol_type = other DNA
gttaataagacacataaaagccagc

SEQ ID NO: 33419 - DNA, 25 bp, synthetic construct
  misc_feature 1..25: note = Oligonucleotide
  source 1..25: mol_type = other DNA
tttgttaataagacacataaaagcc

SEQ ID NO: 33420 - DNA, 25 bp, synthetic construct
  misc_feature 1..25: note = Oligonucleotide
  source 1..25: mol_type = other DNA
agttttgttaataagacacataaaa

SEQ ID NO: 33421 - DNA, 25 bp, synthetic construct
  misc_feature 1..25: note = Oligonucleotide
  source 1..25: mol_type = other DNA
tccagttttgttaataagacacata

SEQ ID NO: 33422 - DNA, 25 bp, synthetic construct
  misc_feature 1..25: note = Oligonucleotide
  source 1..25: mol_type = other DNA
ttttccagttttgttaataagacac

SEQ ID NO: 33423 - DNA, 25 bp, synthetic construct
  misc_feature 1..25: note = Oligonucleotide
  source 1..25: mol_type = other DNA
catttttccagttttgttaataaga

SEQ ID NO: 33424 - DNA, 25 bp, synthetic construct
  misc_feature 1..25: note = Oligonucleotide
  source 1..25: mol_type = other DNA
actcatttttccagttttgttaata

SEQ ID NO: 33425 - DNA, 25 bp, synthetic construct
  misc_feature 1..25: note = Oligonucleotide
  source 1..25: mol_type = other DNA
caaactcatttttccagttttgtta

SEQ ID NO: 33426 - DNA, 25 bp, synthetic construct
  misc_feature 1..25: note = Oligonucleotide
  source 1..25: mol_type = other DNA
acacaaactcatttttccagttttg

SEQ ID NO: 33427 - DNA, 25 bp, synthetic construct
  misc_feature 1..25: note = Oligonucleotide
  source 1..25: mol_type = other DNA
ataacacaaactcatttttccagtt

SEQ ID NO: 33428 - DNA, 25 bp, synthetic construct
  misc_feature 1..25: note = Oligonucleotide
  source 1..25: mol_type = other DNA
tacataacacaaactcatttttcca

SEQ ID NO: 33429 - DNA, 25 bp, synthetic construct
  misc_feature 1..25: note = Oligonucleotide
  source 1..25: mol_type = other DNA
gattacataacacaaactcattttt

SEQ ID NO: 33430 - DNA, 25 bp, synthetic construct
  misc_feature 1..25: note = Oligonucleotide
  source 1..25: mol_type = other DNA
atggattacataacacaaactcatt

SEQ ID NO: 33431 - DNA, 25 bp, synthetic construct
  misc_feature 1..25: note = Oligonucleotide
  source 1..25: mol_type = other DNA
tgtatggattacataacacaaactc

SEQ ID NO: 33432 - DNA, 25 bp, synthetic construct
  misc_feature 1..25: note = Oligonucleotide
  source 1..25: mol_type = other DNA
aattgtatggattacataacacaaa

SEQ ID NO: 33433 - DNA, 25 bp, synthetic construct
  misc_feature 1..25: note = Oligonucleotide
  source 1..25: mol_type = other DNA
acaaattgtatggattacataacac

SEQ ID NO: 33434 - DNA, 25 bp, synthetic construct
  misc_feature 1..25: note = Oligonucleotide
  source 1..25: mol_type = other DNA
caaacaaattgtatggattacataa

SEQ ID NO: 33435 - DNA, 25 bp, synthetic construct
  misc_feature 1..25: note = Oligonucleotide
  source 1..25: mol_type = other DNA
aaccaaacaaattgtatggattaca

SEQ ID NO: 33436 - DNA, 25 bp, synthetic construct
  misc_feature 1..25: note = Oligonucleotide
  source 1..25: mol_type = other DNA
gtcaaccaaacaaattgtatggatt

SEQ ID NO: 33437 - DNA, 25 bp, synthetic construct
  misc_feature 1..25: note = Oligonucleotide
  source 1..25: mol_type = other DNA
gttgtcaaccaaacaaattgtatgg

SEQ ID NO: 33438 - DNA, 25 bp, synthetic construct
  misc_feature 1..25: note = Oligonucleotide
  source 1..25: mol_type = other DNA
gatgttgtcaaccaaacaaattgta

SEQ ID NO: 33439 - DNA, 25 bp, synthetic construct
  misc_feature 1..25: note = Oligonucleotide
  source 1..25: mol_type = other DNA
tcagatgttgtcaaccaaacaaatt

SEQ ID NO: 33440 - DNA, 25 bp, synthetic construct
  misc_feature 1..25: note = Oligonucleotide
  source 1..25: mol_type = other DNA
ttttcagatgttgtcaaccaaacaa

SEQ ID NO: 33441 - DNA, 25 bp, synthetic construct
  misc_feature 1..25: note = Oligonucleotide
  source 1..25: mol_type = other DNA
ctgttttcagatgttgtcaaccaaa

SEQ ID NO: 33442 - DNA, 25 bp, synthetic construct
  misc_feature 1..25: note = Oligonucleotide
  source 1..25: mol_type = other DNA
ctcctgttttcagatgttgtcaacc

SEQ ID NO: 33443 - DNA, 25 bp, synthetic construct
  misc_feature 1..25: note = Oligonucleotide
  source 1..25: mol_type = other DNA
agcctcctgttttcagatgttgtca

SEQ ID NO: 33444 - DNA, 25 bp, synthetic construct
  misc_feature 1..25: note = Oligonucleotide
  source 1..25: mol_type = other DNA
accagcctcctgttttcagatgttg

SEQ ID NO: 33445 - DNA, 25 bp, synthetic construct
  misc_feature 1..25: note = Oligonucleotide
  source 1..25: mol_type = other DNA
ttgaccagcctcctgttttcagatg

SEQ ID NO: 33446 - DNA, 25 bp, synthetic construct
  misc_feature 1..25: note = Oligonucleotide
  source 1..25: mol_type = other DNA
cacttgaccagcctcctgttttcag

SEQ ID NO: 33447 - DNA, 25 bp, synthetic construct
  misc_feature 1..25: note = Oligonucleotide
  source 1..25: mol_type = other DNA
ttgcacttgaccagcctcctgtttt

SEQ ID NO: 33448 - DNA, 25 bp, synthetic construct
  misc_feature 1..25: note = Oligonucleotide
  source 1..25: mol_type = other DNA
cacttgcacttgaccagcctcctgt

SEQ ID NO: 33449 - DNA, 25 bp, synthetic construct
  misc_feature 1..25: note = Oligonucleotide
  source 1..25: mol_type = other DNA
ccacacttgcacttgaccagcctcc

SEQ ID NO: 33450 - DNA, 25 bp, synthetic construct
  misc_feature 1..25: note = Oligonucleotide
  source 1..25: mol_type = other DNA
ccgccacacttgcacttgaccagcc

SEQ ID NO: 33451 - DNA, 25 bp, synthetic construct
  misc_feature 1..25: note = Oligonucleotide
  source 1..25: mol_type = other DNA
aacccgccacacttgcacttgacca

SEQ ID NO: 33452 - DNA, 25 bp, synthetic construct
  misc_feature 1..25: note = Oligonucleotide
  source 1..25: mol_type = other DNA
aagaacccgccacacttgcacttga

SEQ ID NO: 33453 - DNA, 25 bp, synthetic construct
  misc_feature 1..25: note = Oligonucleotide
  source 1..25: mol_type = other DNA
ctgaagaacccgccacacttgcact

SEQ ID NO: 33454 - DNA, 25 bp, synthetic construct
  misc_feature 1..25: note = Oligonucleotide
  source 1..25: mol_type = other DNA
ctgctgaagaacccgccacacttgc

SEQ ID NO: 33455 - DNA, 25 bp, synthetic construct
  misc_feature 1..25: note = Oligonucleotide
  source 1..25: mol_type = other DNA
tgcctgctgaagaacccgccacact

SEQ ID NO: 33456 - DNA, 25 bp, synthetic construct
  misc_feature 1..25: note = Oligonucleotide
  source 1..25: mol_type = other DNA
tgctgcctgctgaagaacccgccac

SEQ ID NO: 33457 - DNA, 25 bp, synthetic construct
  misc_feature 1..25: note = Oligonucleotide
  source 1..25: mol_type = other DNA
tggtgctgcctgctgaagaacccgc

SEQ ID NO: 33458 - DNA, 25 bp, synthetic construct
  misc_feature 1..25: note = Oligonucleotide
  source 1..25: mol_type = other DNA
tcatggtgctgcctgctgaagaacc

SEQ ID NO: 33459 - DNA, 25 bp, synthetic construct
  misc_feature 1..25: note = Oligonucleotide
  source 1..25: mol_type = other DNA
gtgtcatggtgctgcctgctgaaga

SEQ ID NO: 33460 - DNA, 25 bp, synthetic construct
  misc_feature 1..25: note = Oligonucleotide
  source 1..25: mol_type = other DNA
gaagtgtcatggtgctgcctgctga

SEQ ID NO: 33461 - DNA, 25 bp, synthetic construct
  misc_feature 1..25: note = Oligonucleotide
  source 1..25: mol_type = other DNA
acggaagtgtcatggtgctgcctgc

SEQ ID NO: 33462 - DNA, 25 bp, synthetic construct
  misc_feature 1..25: note = Oligonucleotide
  source 1..25: mol_type = other DNA
ggcacggaagtgtcatggtgctgcc

SEQ ID NO: 33463 - DNA, 25 bp, synthetic construct
  misc_feature 1..25: note = Oligonucleotide
  source 1..25: mol_type = other DNA
agaggcacggaagtgtcatggtgct

SEQ ID NO: 33464 - DNA, 25 bp, synthetic construct
  misc_feature 1..25: note = Oligonucleotide
  source 1..25: mol_type = other DNA
gacagaggcacggaagtgtcatggt

SEQ ID NO: 33465 - DNA, 25 bp, synthetic construct
  misc_feature 1..25: note = Oligonucleotide
  source 1..25: mol_type = other DNA
gtcgacagaggcacggaagtgtcat

SEQ ID NO: 33466 - DNA, 25 bp, synthetic construct
  misc_feature 1..25: note = Oligonucleotide
  source 1..25: mol_type = other DNA
cacgtcgacagaggcacggaagtgt

SEQ ID NO: 33467 - DNA, 25 bp, synthetic construct
  misc_feature 1..25: note = Oligonucleotide
  source 1..25: mol_type = other DNA
ctccacgtcgacagaggcacggaag

SEQ ID NO: 33468 - DNA, 25 bp, synthetic construct
  misc_feature 1..25: note = Oligonucleotide
  source 1..25: mol_type = other DNA
cttctccacgtcgacagaggcacgg

SEQ ID NO: 33469 - DNA, 25 bp, synthetic construct
  misc_feature 1..25: note = Oligonucleotide
  source 1..25: mol_type = other DNA
acccttctccacgtcgacagaggca

SEQ ID NO: 33470 - DNA, 25 bp, synthetic construct
  misc_feature 1..25: note = Oligonucleotide
  source 1..25: mol_type = other DNA
cacacccttctccacgtcgacagag

SEQ ID NO: 33471 - DNA, 25 bp, synthetic construct
  misc_feature 1..25: note = Oligonucleotide
  source 1..25: mol_type = other DNA
catcacacccttctccacgtcgaca

SEQ ID NO: 33472 - DNA, 25 bp, synthetic construct
  misc_feature 1..25: note = Oligonucleotide
  source 1..25: mol_type = other DNA
ctccatcacacccttctccacgtcg

SEQ ID NO: 33473 - DNA, 25 bp, synthetic construct
  misc_feature 1..25: note = Oligonucleotide
  source 1..25: mol_type = other DNA
ttcctccatcacacccttctccacg

SEQ ID NO: 33474 - DNA, 25 bp, synthetic construct
  misc_feature 1..25: note = Oligonucleotide
  source 1..25: mol_type = other DNA
cctttcctccatcacacccttctcc

SEQ ID NO: 33475 - DNA, 25 bp, synthetic construct
  misc_feature 1..25: note = Oligonucleotide
  source 1..25: mol_type = other DNA
cctcctttcctccatcacacccttc

SEQ ID NO: 33476 - DNA, 25 bp, synthetic construct
  misc_feature 1..25: note = Oligonucleotide
  source 1..25: mol_type = other DNA
acccctcctttcctccatcacaccc

SEQ ID NO: 33477 - DNA, 25 bp, synthetic construct
  misc_feature 1..25: note = Oligonucleotide
  source 1..25: mol_type = other DNA
cagacccctcctttcctccatcaca

SEQ ID NO: 33478 - DNA, 25 bp, synthetic construct
  misc_feature 1..25: note = Oligonucleotide
  source 1..25: mol_type = other DNA
catcagacccctcctttcctccatc

SEQ ID NO: 33479 - DNA, 25 bp, synthetic construct
  misc_feature 1..25: note = Oligonucleotide
  source 1..25: mol_type = other DNA
gggcatcagacccctcctttcctcc

SEQ ID NO: 33480 - DNA, 25 bp, synthetic construct
  misc_feature 1..25: note = Oligonucleotide
  source 1..25: mol_type = other DNA
gtggggcatcagacccctcctttcc

SEQ ID NO: 33481 - DNA, 25 bp, synthetic construct
  misc_feature 1..25: note = Oligonucleotide
  source 1..25: mol_type = other DNA
caggtggggcatcagacccctcctt

SEQ ID NO: 33482 - DNA, 25 bp, synthetic construct
  misc_feature 1..25: note = Oligonucleotide
  source 1..25: mol_type = other DNA
actcaggtggggcatcagacccctc

SEQ ID NO: 33483 - DNA, 25 bp, synthetic construct
  misc_feature 1..25: note = Oligonucleotide
  source 1..25: mol_type = other DNA
accactcaggtggggcatcagaccc

SEQ ID NO: 33484 - DNA, 25 bp, synthetic construct
  misc_feature 1..25: note = Oligonucleotide
  source 1..25: mol_type = other DNA
atcaccactcaggtggggcatcaga

SEQ ID NO: 33485 - DNA, 25 bp, synthetic construct
  misc_feature 1..25: note = Oligonucleotide
  source 1..25: mol_type = other DNA
ctcatcaccactcaggtggggcatc

SEQ ID NO: 33486 - DNA, 25 bp, synthetic construct
  misc_feature 1..25: note = Oligonucleotide
  source 1..25: mol_type = other DNA
agcctcatcaccactcaggtggggc

SEQ ID NO: 33487 - DNA, 25 bp, synthetic construct
  misc_feature 1..25: note = Oligonucleotide
  source 1..25: mol_type = other DNA
ccaagcctcatcaccactcaggtgg

SEQ ID NO: 33488 - DNA, 25 bp, synthetic construct
  misc_feature 1..25: note = Oligonucleotide
  source 1..25: mol_type = other DNA
aggccaagcctcatcaccactcagg

SEQ ID NO: 33489 - DNA, 25 bp, synthetic construct
  misc_feature 1..25: note = Oligonucleotide
  source 1..25: mol_type = other DNA
ctcaggccaagcctcatcaccactc

SEQ ID NO: 33490 - DNA, 25 bp, synthetic construct
  misc_feature 1..25: note = Oligonucleotide
  source 1..25: mol_type = other DNA
cagctcaggccaagcctcatcacca

SEQ ID NO: 33491 - DNA, 25 bp, synthetic construct
  misc_feature 1..25: note = Oligonucleotide
  source 1..25: mol_type = other DNA
ggccagctcaggccaagcctcatca

SEQ ID NO: 33492 - DNA, 25 bp, synthetic construct
  misc_feature 1..25: note = Oligonucleotide
  source 1..25: mol_type = other DNA
taaggccagctcaggccaagcctca

SEQ ID NO: 33493 - DNA, 25 bp, synthetic construct
  misc_feature 1..25: note = Oligonucleotide
  source 1..25: mol_type = other DNA
acctaaggccagctcaggccaagcc

SEQ ID NO: 33494 - DNA, 25 bp, synthetic construct
  misc_feature 1..25: note = Oligonucleotide
  source 1..25: mol_type = other DNA
tgaacctaaggccagctcaggccaa

SEQ ID NO: 33495 - DNA, 25 bp, synthetic construct
  misc_feature 1..25: note = Oligonucleotide
  source 1..25: mol_type = other DNA
cgctgaacctaaggccagctcaggc

SEQ ID NO: 33496 - DNA, 25 bp, synthetic construct
  misc_feature 1..25: note = Oligonucleotide
  source 1..25: mol_type = other DNA
tcccgctgaacctaaggccagctca

SEQ ID NO: 33497 - DNA, 25 bp, synthetic construct
  misc_feature 1..25: note = Oligonucleotide
  source 1..25: mol_type = other DNA
tcatcccgctgaacctaaggccagc

SEQ ID NO: 33498 - DNA, 25 bp, synthetic construct
  misc_feature 1..25: note = Oligonucleotide
  source 1..25: mol_type = other DNA
ccctcatcccgctgaacctaaggcc

SEQ ID NO: 33499 - DNA, 25 bp, synthetic construct
  misc_feature 1..25: note = Oligonucleotide
  source 1..25: mol_type = other DNA
cacccctcatcccgctgaacctaag

SEQ ID NO: 33500 - DNA, 25 bp, synthetic construct
  misc_feature 1..25: note = Oligonucleotide
  source 1..25: mol_type = other DNA
ctgcacccctcatcccgctgaacct

SEQ ID NO: 33501 - DNA, 25 bp, synthetic construct
  misc_feature 1..25: note = Oligonucleotide
  source 1..25: mol_type = other DNA
cacctgcacccctcatcccgctgaa

SEQ ID NO: 33502 - DNA, 25 bp, synthetic construct
  misc_feature 1..25: note = Oligonucleotide
  source 1..25: mol_type = other DNA
ccacacctgcacccctcatcccgct

SEQ ID NO: 33503 - DNA, 25 bp, synthetic construct
  misc_feature 1..25: note = Oligonucleotide
  source 1..25: mol_type = other DNA
caaccacacctgcacccctcatccc

SEQ ID NO: 33504 - DNA, 25 bp, synthetic construct
  misc_feature 1..25: note = Oligonucleotide
  source 1..25: mol_type = other DNA
ccccaaccacacctgcacccctcat

SEQ ID NO: 33505 - DNA, 25 bp, synthetic construct
  misc_feature 1..25: note = Oligonucleotide
  source 1..25: mol_type = other DNA
attccccaaccacacctgcacccct

SEQ ID NO: 33506 - DNA, 25 bp, synthetic construct
  misc_feature 1..25: note = Oligonucleotide
  source 1..25: mol_type = other DNA
ggcattccccaaccacacctgcacc

SEQ ID NO: 33507 - DNA, 25 bp, synthetic construct
  misc_feature 1..25: note = Oligonucleotide
  source 1..25: mol_type = other DNA
cctggcattccccaaccacacctgc

SEQ ID NO: 33508 - DNA, 25 bp, synthetic construct
  misc_feature 1..25: note = Oligonucleotide
  source 1..25: mol_type = other DNA
tatcctggcattccccaaccacacc

SEQ ID NO: 33509 - DNA, 25 bp, synthetic construct
  misc_feature 1..25: note = Oligonucleotide
  source 1..25: mol_type = other DNA
tcttatcctggcattccccaaccac

SEQ ID NO: 33510 - DNA, 25 bp, synthetic construct
  misc_feature 1..25: note = Oligonucleotide
  source 1..25: mol_type = other DNA
atatcttatcctggcattccccaac

SEQ ID NO: 33511 - DNA, 25 bp, synthetic construct
  misc_feature 1..25: note = Oligonucleotide
  source 1..25: mol_type = other DNA
cctatatcttatcctggcattcccc

SEQ ID NO: 33512 - DNA, 25 bp, synthetic construct
  misc_feature 1..25: note = Oligonucleotide
  source 1..25: mol_type = other DNA
tgacctatatcttatcctggcattc

SEQ ID NO: 33513 - DNA, 25 bp, synthetic construct
  misc_feature 1..25: note = Oligonucleotide
  source 1..25: mol_type = other DNA
tgatgacctatatcttatcctggca

SEQ ID NO: 33514 - DNA, 25 bp, synthetic construct
  misc_feature 1..25: note = Oligonucleotide
  source 1..25: mol_type = other DNA
ttctgatgacctatatcttatcctg

SEQ ID NO: 33515 - DNA, 25 bp, synthetic construct
  misc_feature 1..25: note = Oligonucleotide
  source 1..25: mol_type = other DNA
tggttctgatgacctatatcttatc

SEQ ID NO: 33516 - DNA, 25 bp, synthetic construct
  misc_feature 1..25: note = Oligonucleotide
  source 1..25: mol_type = other DNA
ccttggttctgatgacctatatctt

SEQ ID NO: 33517 - DNA, 25 bp, synthetic construct
  misc_feature 1..25: note = Oligonucleotide
  source 1..25: mol_type = other DNA
tccccttggttctgatgacctatat

SEQ ID NO: 33518 - DNA, 25 bp, synthetic construct
  misc_feature 1..25: note = Oligonucleotide
  source 1..25: mol_type = other DNA
ggatccccttggttctgatgaccta

SEQ ID NO: 33519 - DNA, 25 bp, synthetic construct
  misc_feature 1..25: note = Oligonucleotide
  source 1..25: mol_type = other DNA
ggaggatccccttggttctgatgac

SEQ ID NO: 33520 - DNA, 25 bp, synthetic construct
  misc_feature 1..25: note = Oligonucleotide
  source 1..25: mol_type = other DNA
cttggaggatccccttggttctgat

SEQ ID NO: 33521 - DNA, 25 bp, synthetic construct
  misc_feature 1..25: note = Oligonucleotide
  source 1..25: mol_type = other DNA
caacttggaggatccccttggttct

SEQ ID NO: 33522 - DNA, 25 bp, synthetic construct
  misc_feature 1..25: note = Oligonucleotide
  source 1..25: mol_type = other DNA
atccaacttggaggatccccttggt

SEQ ID NO: 33523 - DNA, 25 bp, synthetic construct
  misc_feature 1..25: note = Oligonucleotide
  source 1..25: mol_type = other DNA
gaaatccaacttggaggatcccctt

SEQ ID NO: 33524 - DNA, 25 bp, synthetic construct
  misc_feature 1..25: note = Oligonucleotide
  source 1..25: mol_type = other DNA
agagaaatccaacttggaggatccc

SEQ ID NO: 33525 - DNA, 25 bp, synthetic construct
  misc_feature 1..25: note = Oligonucleotide
  source 1..25: mol_type = other DNA
aatagagaaatccaacttggaggat

SEQ ID NO: 33526 - DNA, 25 bp, synthetic construct
  misc_feature 1..25: note = Oligonucleotide
  source 1..25: mol_type = other DNA
tagaatagagaaatccaacttggag

SEQ ID NO: 33527 - DNA, 25 bp, synthetic construct
  misc_feature 1..25: note = Oligonucleotide
  source 1..25: mol_type = other DNA
atatagaatagagaaatccaacttg

SEQ ID NO: 33528 - DNA, 25 bp, synthetic construct
  misc_feature 1..25: note = Oligonucleotide
  source 1..25: mol_type = other DNA
cccatatagaatagagaaatccaac

SEQ ID NO: 33529 - DNA, 25 bp, synthetic construct
  misc_feature 1..25: note = Oligonucleotide
  source 1..25: mol_type = other DNA
ccgcccatatagaatagagaaatcc

SEQ ID NO: 33530 - DNA, 25 bp, synthetic construct
  misc_feature 1..25: note = Oligonucleotide
  source 1..25: mol_type = other DNA
agcccgcccatatagaatagagaaa

SEQ ID NO: 33531 - DNA, 25 bp, synthetic construct
  misc_feature 1..25: note = Oligonucleotide
  source 1..25: mol_type = other DNA
ctaagcccgcccatatagaatagag

SEQ ID NO: 33532 - DNA, 25 bp, synthetic construct
  misc_feature 1..25: note = Oligonucleotide
  source 1..25: mol_type = other DNA
cctctaagcccgcccatatagaata

SEQ ID NO: 33533 - DNA, 25 bp, synthetic construct
  misc_feature 1..25: note = Oligonucleotide
  source 1..25: mol_type = other DNA
ccccctctaagcccgcccatataga

SEQ ID NO: 33534 - DNA, 25 bp, synthetic construct
  misc_feature 1..25: note = Oligonucleotide
  source 1..25: mol_type = other DNA
cagccccctctaagcccgcccatat

SEQ ID NO: 33535 - DNA, 25 bp, synthetic construct
  misc_feature 1..25: note = Oligonucleotide
  source 1..25: mol_type = other DNA
caacagccccctctaagcccgccca

SEQ ID NO: 33536 - DNA, 25 bp, synthetic construct
  misc_feature 1..25: note = Oligonucleotide
  source 1..25: mol_type = other DNA
agtcaacagccccctctaagcccgc

SEQ ID NO: 33537 - DNA, 25 bp, synthetic construct
  misc_feature 1..25: note = Oligonucleotide
  source 1..25: mol_type = other DNA
gtaagtcaacagccccctctaagcc

SEQ ID NO: 33538 - DNA, 25 bp, synthetic construct
  misc_feature 1..25: note = Oligonucleotide
  source 1..25: mol_type = other DNA
tcagtaagtcaacagccccctctaa

SEQ ID NO: 33539 - DNA, 25 bp, synthetic construct
  misc_feature 1..25: note = Oligonucleotide
  source 1..25: mol_type = other DNA
ctctcagtaagtcaacagccccctc

SEQ ID NO: 33540 - DNA, 25 bp, synthetic construct
  misc_feature 1..25: note = Oligonucleotide
  source 1..25: mol_type = other DNA
tgactctcagtaagtcaacagcccc

SEQ ID NO: 33541 - DNA, 25 bp, synthetic construct
  misc_feature 1..25: note = Oligonucleotide
  source 1..25: mol_type = other DNA
gtgtgactctcagtaagtcaacagc

SEQ ID NO: 33542 - DNA, 25 bp, synthetic construct
  misc_feature 1..25: note = Oligonucleotide
  source 1..25: mol_type = other DNA
gttgtgtgactctcagtaagtcaac

SEQ ID NO: 33543 - DNA, 25 bp, synthetic construct
  misc_feature 1..25: note = Oligonucleotide
  source 1..25: mol_type = other DNA
tacgttgtgtgactctcagtaagtc

SEQ ID NO: 33544 - DNA, 25 bp, synthetic construct
  misc_feature 1..25: note = Oligonucleotide
  source 1..25: mol_type = other DNA
tactacgttgtgtgactctcagtaa

SEQ ID NO: 33545 - DNA, 25 bp, synthetic construct
  misc_feature 1..25: note = Oligonucleotide
  source 1..25: mol_type = other DNA
agctactacgttgtgtgactctcag

SEQ ID NO: 33546 - DNA, 25 bp, synthetic construct
  misc_feature 1..25: note = Oligonucleotide
  source 1..25: mol_type = other DNA
cccagctactacgttgtgtgactct

SEQ ID NO: 33547 - DNA, 25 bp, synthetic construct
  misc_feature 1..25: note = Oligonucleotide
  source 1..25: mol_type = other DNA
ggtcccagctactacgttgtgtgac

SEQ ID NO: 33548 - DNA, 25 bp, synthetic construct
  misc_feature 1..25: note = Oligonucleotide
  source 1..25: mol_type = other DNA
ccaggtcccagctactacgttgtgt

SEQ ID NO: 33549 - DNA, 25 bp, synthetic construct
  misc_feature 1..25: note = Oligonucleotide
  source 1..25: mol_type = other DNA
attccaggtcccagctactacgttg

SEQ ID NO: 33550 - DNA, 25 bp, synthetic construct
  misc_feature 1..25: note = Oligonucleotide
  source 1..25: mol_type = other DNA
tggattccaggtcccagctactacg

SEQ ID NO: 33551 - DNA, 25 bp, synthetic construct
  misc_feature 1..25: note = Oligonucleotide
  source 1..25: mol_type = other DNA
ggctggattccaggtcccagctact

SEQ ID NO: 33552 - DNA, 25 bp, synthetic construct
  misc_feature 1..25: note = Oligonucleotide
  source 1..25: mol_type = other DNA
tcgggctggattccaggtcccagct

SEQ ID NO: 33553 - DNA, 25 bp, synthetic construct
  misc_feature 1..25: note = Oligonucleotide
  source 1..25: mol_type = other DNA
gtatcgggctggattccaggtccca

SEQ ID NO: 33554 - DNA, 25 bp, synthetic construct
  misc_feature 1..25: note = Oligonucleotide
  source 1..25: mol_type = other DNA
aaagtatcgggctggattccaggtc

SEQ ID NO: 33555 - DNA, 25 bp, synthetic construct
  misc_feature 1..25: note = Oligonucleotide
  source 1..25: mol_type = other DNA
aaaaaagtatcgggctggattccag

SEQ ID NO: 33556 - DNA, 25 bp, synthetic construct
  misc_feature 1..25: note = Oligonucleotide
  source 1..25: mol_type = other DNA
atcaaaaaagtatcgggctggattc

SEQ ID NO: 33557 - DNA, 25 bp, synthetic construct
  misc_feature 1..25: note = Oligonucleotide
  source 1..25: mol_type = other DNA
gatatcaaaaaagtatcgggctgga

SEQ ID NO: 33558 - DNA, 25 bp, synthetic construct
  misc_feature 1..25: note = Oligonucleotide
  source 1..25: mol_type = other DNA
acagatatcaaaaaagtatcgggct

SEQ ID NO: 33559 - DNA, 25 bp, synthetic construct
  misc_feature 1..25: note = Oligonucleotide
  source 1..25: mol_type = other DNA
ggcacagatatcaaaaaagtatcgg

SEQ ID NO: 33560 - DNA, 25 bp, synthetic construct
  misc_feature 1..25: note = Oligonucleotide
  source 1..25: mol_type = other DNA
gaaggcacagatatcaaaaaagtat

SEQ ID NO: 33561 - DNA, 25 bp, synthetic construct
  misc_feature 1..25: note = Oligonucleotide
  source 1..25: mol_type = other DNA
tcagaaggcacagatatcaaaaaag

SEQ ID NO: 33562 - DNA, 25 bp, synthetic construct
  misc_feature 1..25: note = Oligonucleotide
  source 1..25: mol_type = other DNA
ctatcagaaggcacagatatcaaaa

SEQ ID NO: 33563 - DNA, 25 bp, synthetic construct
  misc_feature 1..25: note = Oligonucleotide
  source 1..25: mol_type = other DNA
tttctatcagaaggcacagatatca

SEQ ID NO: 33564 - DNA, 25 bp, synthetic construct
  misc_feature 1..25: note = Oligonucleotide
  source 1..25: mol_type = other DNA
ctatttctatcagaaggcacagata

SEQ ID NO: 33565 - DNA, 25 bp, synthetic construct
  misc_feature 1..25: note = Oligonucleotide
  source 1..25: mol_type = other DNA
tgcctatttctatcagaaggcacag

SEQ ID NO: 33566 - DNA, 25 bp, synthetic construct
  misc_feature 1..25: note = Oligonucleotide
  source 1..25: mol_type = other DNA
gagtgcctatttctatcagaaggca

SEQ ID NO: 33567 - DNA, 25 bp, synthetic construct
  misc_feature 1..25: note = Oligonucleotide
  source 1..25: mol_type = other DNA
aaagagtgcctatttctatcagaag

SEQ ID NO: 33568 - DNA, 25 bp, synthetic construct
  misc_feature 1..25: note = Oligonucleotide
  source 1..25: mol_type = other DNA
aggaaagagtgcctatttctatcag

SEQ ID NO: 33569 - DNA, 25 bp, synthetic construct
  misc_feature 1..25: note = Oligonucleotide
  source 1..25: mol_type = other DNA
aagaggaaagagtgcctatttctat

SEQ ID NO: 33570 - DNA, 25 bp, synthetic construct
  misc_feature 1..25: note = Oligonucleotide
  source 1..25: mol_type = other DNA
ggaaagaggaaagagtgcctatttc

SEQ ID NO: 33571 - DNA, 25 bp, synthetic construct
  misc_feature 1..25: note = Oligonucleotide
  source 1..25: mol_type = other DNA
gacggaaagaggaaagagtgcctat

SEQ ID NO: 33572 - DNA, 25 bp, synthetic construct
  misc_feature 1..25: note = Oligonucleotide
  source 1..25: mol_type = other DNA
ccggacggaaagaggaaagagtgcc

SEQ ID NO: 33573 - DNA, 25 bp, synthetic construct
  misc_feature 1..25: note = Oligonucleotide
  source 1..25: mol_type = other DNA
tggccggacggaaagaggaaagagt

SEQ ID NO: 33574 - DNA, 25 bp, synthetic construct
  misc_feature 1..25: note = Oligonucleotide
  source 1..25: mol_type = other DNA
cagtggccggacggaaagaggaaag

SEQ ID NO: 33575 - DNA, 25 bp, synthetic construct
  misc_feature 1..25: note = Oligonucleotide
  source 1..25: mol_type = other DNA
gagcagtggccggacggaaagagga

SEQ ID NO: 33576 - DNA, 25 bp, synthetic construct
  misc_feature 1..25: note = Oligonucleotide
  source 1..25: mol_type = other DNA
gtggagcagtggccggacggaaaga

SEQ ID NO: 33577 - DNA, 25 bp, synthetic construct
  misc_feature 1..25: note = Oligonucleotide
  source 1..25: mol_type = other DNA
taggtggagcagtggccggacggaa

SEQ ID NO: 33578 - DNA, 25 bp, synthetic construct
  misc_feature 1..25: note = Oligonucleotide
  source 1..25: mol_type = other DNA
acataggtggagcagtggccggacg

SEQ ID NO: 33579 - DNA, 25 bp, synthetic construct
  misc_feature 1..25: note = Oligonucleotide
  source 1..25: mol_type = other DNA
taaacataggtggagcagtggccgg

SEQ ID NO: 33580 - DNA, 25 bp, synthetic construct
  misc_feature 1..25: note = Oligonucleotide
  source 1..25: mol_type = other DNA
ctgtaaacataggtggagcagtggc

SEQ ID NO: 33581 - DNA, 25 bp, synthetic construct
  misc_feature 1..25: note = Oligonucleotide
  source 1..25: mol_type = other DNA
tggctgtaaacataggtggagcagt

SEQ ID NO: 33582 - DNA, 25 bp, synthetic construct
  misc_feature 1..25: note = Oligonucleotide
  source 1..25: mol_type = other DNA
agatggctgtaaacataggtggagc

SEQ ID NO: 33583 - DNA, 25 bp, synthetic construct
  misc_feature 1..25: note = Oligonucleotide
  source 1..25: mol_type = other DNA
gatagatggctgtaaacataggtgg

SEQ ID NO: 33584 - DNA, 25 bp, synthetic construct
  misc_feature 1..25: note = Oligonucleotide
  source 1..25: mol_type = other DNA
aaggatagatggctgtaaacatagg

SEQ ID NO: 33585 - DNA, 25 bp, synthetic construct
  misc_feature 1..25: note = Oligonucleotide
  source 1..25: mol_type = other DNA
tcaaaggatagatggctgtaaacat

SEQ ID NO: 33586 - DNA, 25 bp, synthetic construct
  misc_feature 1..25: note = Oligonucleotide
  source 1..25: mol_type = other DNA
gagtcaaaggatagatggctgtaaa

SEQ ID NO: 33587 - DNA, 25 bp, synthetic construct
  misc_feature 1..25: note = Oligonucleotide
  source 1..25: mol_type = other DNA
ggtgagtcaaaggatagatggctgt

SEQ ID NO: 33588 - DNA, 25 bp, synthetic construct
  misc_feature 1..25: note = Oligonucleotide
  source 1..25: mol_type = other DNA
gtgggtgagtcaaaggatagatggc

SEQ ID NO: 33589 - DNA, 25 bp, synthetic construct
  misc_feature 1..25: note = Oligonucleotide
  source 1..25: mol_type = other DNA
tgggtgggtgagtcaaaggatagat

SEQ ID NO: 33590 - DNA, 25 bp, synthetic construct
  misc_feature 1..25: note = Oligonucleotide
  source 1..25: mol_type = other DNA
ggatgggtgggtgagtcaaaggata

SEQ ID NO: 33591 - DNA, 25 bp, synthetic construct
  misc_feature 1..25: note = Oligonucleotide
  source 1..25: mol_type = other DNA
gtgggatgggtgggtgagtcaaagg

SEQ ID NO: 33592 - DNA, 25 bp, synthetic construct
  misc_feature 1..25: note = Oligonucleotide
  source 1..25: mol_type = other DNA
atggtgggatgggtgggtgagtcaa

SEQ ID NO: 33593 - DNA, 25 bp, synthetic construct
  misc_feature 1..25: note = Oligonucleotide
  source 1..25: mol_type = other DNA
atgatggtgggatgggtgggtgagt

SEQ ID NO: 33594 - DNA, 25 bp, synthetic construct
  misc_feature 1..25: note = Oligonucleotide
  source 1..25: mol_type = other DNA
aagatgatggtgggatgggtgggtg

SEQ ID NO: 33595 - DNA, 25 bp, synthetic construct
  misc_feature 1..25: note = Oligonucleotide
  source 1..25: mol_type = other DNA
aagaagatgatggtgggatgggtgg

SEQ ID NO: 33596 - DNA, 25 bp, synthetic construct
  misc_feature 1..25: note = Oligonucleotide
  source 1..25: mol_type = other DNA
gttaagaagatgatggtgggatggg

SEQ ID NO: 33597 - DNA, 25 bp, synthetic construct
  misc_feature 1..25: note = Oligonucleotide
  source 1..25: mol_type = other DNA
acggttaagaagatgatggtgggat

SEQ ID NO: 33598 - DNA, 25 bp, synthetic construct
  misc_feature 1..25: note = Oligonucleotide
  source 1..25: mol_type = other DNA
tcaacggttaagaagatgatggtgg

SEQ ID NO: 33599 - DNA, 25 bp, synthetic construct
  misc_feature 1..25: note = Oligonucleotide
  source 1..25: mol_type = other DNA
gagtcaacggttaagaagatgatgg

SEQ ID NO: 33600 - DNA, 25 bp, synthetic construct
  misc_feature 1..25: note = Oligonucleotide
  source 1..25: mol_type = other DNA
ggtgagtcaacggttaagaagatga

SEQ ID NO: 33601 - DNA, 25 bp, synthetic construct
  misc_feature 1..25: note = Oligonucleotide
  source 1..25: mol_type = other DNA
gctggtgagtcaacggttaagaaga

SEQ ID NO: 33602 - DNA, 25 bp, synthetic construct
  misc_feature 1..25: note = Oligonucleotide
  source 1..25: mol_type = other DNA
ttggctggtgagtcaacggttaaga

SEQ ID NO: 33603 - DNA, 25 bp, synthetic construct
  misc_feature 1..25: note = Oligonucleotide
  source 1..25: mol_type = other DNA
gggttggctggtgagtcaacggtta

SEQ ID NO: 33604 - DNA, 25 bp, synthetic construct
  misc_feature 1..25: note = Oligonucleotide
  source 1..25: mol_type = other DNA
attgggttggctggtgagtcaacgg

SEQ ID NO: 33605 - DNA, 25 bp, synthetic construct
  misc_feature 1..25: note = Oligonucleotide
  source 1..25: mol_type = other DNA
tggattgggttggctggtgagtcaa

SEQ ID NO: 33606 - DNA, 25 bp, synthetic construct
  misc_feature 1..25: note = Oligonucleotide
  source 1..25: mol_type = other DNA
tggtggattgggttggctggtgagt

SEQ ID NO: 33607 - DNA, 25 bp, synthetic construct
  misc_feature 1..25: note = Oligonucleotide
  source 1..25: mol_type = other DNA
gggtggtggattgggttggctggtg

SEQ ID NO: 33608 - DNA, 25 bp, synthetic construct
  misc_feature 1..25: note = Oligonucleotide
  source 1..25: mol_type = other DNA
gaggggtggtggattgggttggctg

SEQ ID NO: 33609 - DNA, 25 bp, synthetic construct
  misc_feature 1..25: note = Oligonucleotide
  source 1..25: mol_type = other DNA
agggaggggtggtggattgggttgg

SEQ ID NO: 33610 - DNA, 25 bp, synthetic construct
  misc_feature 1..25: note = Oligonucleotide
  source 1..25: mol_type = other DNA
ggaagggaggggtggtggattgggt

SEQ ID NO: 33611 - DNA, 25 bp, synthetic construct
  misc_feature 1..25: note = Oligonucleotide
  source 1..25: mol_type = other DNA
ggaggaagggaggggtggtggattg

SEQ ID NO: 33612 - DNA, 25 bp, synthetic construct
  misc_feature 1..25: note = Oligonucleotide
  source 1..25: mol_type = other DNA
gatggaggaagggaggggtggtgga

SEQ ID NO: 33613 - DNA, 25 bp, synthetic construct
  misc_feature 1..25: note = Oligonucleotide
  source 1..25: mol_type = other DNA
atggatggaggaagggaggggtggt

SEQ ID NO: 33614 - DNA, 25 bp, synthetic construct
  misc_feature 1..25: note = Oligonucleotide
  source 1..25: mol_type = other DNA
tggatggatggaggaagggaggggt

SEQ ID NO: 33615 - DNA, 25 bp, synthetic construct
  misc_feature 1..25: note = Oligonucleotide
  source 1..25: mol_type = other DNA
aggtggatggatggaggaagggagg

SEQ ID NO: 33616 - DNA, 25 bp, synthetic construct
  misc_feature 1..25: note = Oligonucleotide
  source 1..25: mol_type = other DNA
gagaggtggatggatggaggaaggg

SEQ ID NO: 33617 - DNA, 25 bp, synthetic construct
  misc_feature 1..25: note = Oligonucleotide
  source 1..25: mol_type = other DNA
gtggagaggtggatggatggaggaa

SEQ ID NO: 33618 - DNA, 25 bp, synthetic construct
  misc_feature 1..25: note = Oligonucleotide
  source 1..25: mol_type = other DNA
taggtggagaggtggatggatggag

SEQ ID NO: 33619 - DNA, 25 bp, synthetic construct
  misc_feature 1..25: note = Oligonucleotide
  source 1..25: mol_type = other DNA
aggtaggtggagaggtggatggatg

SEQ ID NO: 33620 - DNA, 25 bp, synthetic construct
  misc_feature 1..25: note = Oligonucleotide
  source 1..25: mol_type = other DNA
gacaggtaggtggagaggtggatgg

SEQ ID NO: 33621 - DNA, 25 bp, synthetic construct
  misc_feature 1..25: note = Oligonucleotide
  source 1..25: mol_type = other DNA
gtagacaggtaggtggagaggtgga

SEQ ID NO: 33622 - DNA, 25 bp, synthetic construct
  misc_feature 1..25: note = Oligonucleotide
  source 1..25: mol_type = other DNA
tgtgtagacaggtaggtggagaggt

SEQ ID NO: 33623 - DNA, 25 bp, synthetic construct
  misc_feature 1..25: note = Oligonucleotide
  source 1..25: mol_type = other DNA
gggtgtgtagacaggtaggtggaga

SEQ ID NO: 33624 - DNA, 25 bp, synthetic construct
  misc_feature 1..25: note = Oligonucleotide
  source 1..25: mol_type = other DNA
actgggtgtgtagacaggtaggtgg

SEQ ID NO: 33625 - DNA, 25 bp, synthetic construct
  misc_feature 1..25: note = Oligonucleotide
  source 1..25: mol_type = other DNA
tggactgggtgtgtagacaggtagg

SEQ ID NO: 33626 - DNA, 25 bp, synthetic construct
  misc_feature 1..25: note = Oligonucleotide
  source 1..25: mol_type = other DNA
ggatggactgggtgtgtagacaggt

SEQ ID NO: 33627 - DNA, 25 bp, synthetic construct
  misc_feature 1..25: note = Oligonucleotide
  source 1..25: mol_type = other DNA
gatggatggactgggtgtgtagaca

SEQ ID NO: 33628 - DNA, 25 bp, synthetic construct
  misc_feature 1..25: note = Oligonucleotide
  source 1..25: mol_type = other DNA
atggatggatggactgggtgtgtag

SEQ ID NO: 33629 - DNA, 25 bp, synthetic construct
  misc_feature 1..25: note = Oligonucleotide
  source 1..25: mol_type = other DNA
tagatggatggatggactgggtgtg

SEQ ID NO: 33630 - DNA, 25 bp, synthetic construct
  misc_feature 1..25: note = Oligonucleotide
  source 1..25: mol_type = other DNA
gggtagatggatggatggactgggt

SEQ ID NO: 33631 - DNA, 25 bp, synthetic construct
  misc_feature 1..25: note = Oligonucleotide
  source 1..25: mol_type = other DNA
catgggtagatggatggatggactg

SEQ ID NO: 33632 - DNA, 25 bp, synthetic construct
  misc_feature 1..25: note = Oligonucleotide
  source 1..25: mol_type = other DNA
atacatgggtagatggatggatgga

SEQ ID NO: 33633 - DNA, 25 bp, synthetic construct
  misc_feature 1..25: note = Oligonucleotide
  source 1..25: mol_type = other DNA
cagatacatgggtagatggatggat

SEQ ID NO: 33634 - DNA, 25 bp, synthetic construct
  misc_feature 1..25: note = Oligonucleotide
  source 1..25: mol_type = other DNA
agacagatacatgggtagatggatg

SEQ ID NO: 33635 - DNA, 25 bp, synthetic construct
  misc_feature 1..25: note = Oligonucleotide
  source 1..25: mol_type = other DNA
agcagacagatacatgggtagatgg

SEQ ID NO: 33636 - DNA, 25 bp, synthetic construct
  misc_feature 1..25: note = Oligonucleotide
  source 1..25: mol_type = other DNA
aagagcagacagatacatgggtaga

SEQ ID NO: 33637 - DNA, 25 bp, synthetic construct
  misc_feature 1..25: note = Oligonucleotide
  source 1..25: mol_type = other DNA
tcaaagagcagacagatacatgggt

SEQ ID NO: 33638 - DNA, 25 bp, synthetic construct
  misc_feature 1..25: note = Oligonucleotide
  source 1..25: mol_type = other DNA
aggtcaaagagcagacagatacatg

SEQ ID NO: 33639 - DNA, 25 bp, synthetic construct
  misc_feature 1..25: note = Oligonucleotide
  source 1..25: mol_type = other DNA
gataggtcaaagagcagacagatac

SEQ ID NO: 33640 - DNA, 25 bp, synthetic construct
  misc_feature 1..25: note = Oligonucleotide
  source 1..25: mol_type = other DNA
gtagataggtcaaagagcagacaga

SEQ ID NO: 33641 - DNA, 25 bp, synthetic construct
  misc_feature 1..25: note = Oligonucleotide
  source 1..25: mol_type = other DNA
tgggtagataggtcaaagagcagac

SEQ ID NO: 33642 - DNA, 25 bp, synthetic construct
  misc_feature 1..25: note = Oligonucleotide
  source 1..25: mol_type = other DNA
ccatgggtagataggtcaaagagca

SEQ ID NO: 33643 - DNA, 25 bp, synthetic construct
  misc_feature 1..25: note = Oligonucleotide
  source 1..25: mol_type = other DNA
gggccatgggtagataggtcaaaga

SEQ ID NO: 33644 - DNA, 25 bp, synthetic construct
  misc_feature 1..25: note = Oligonucleotide
  source 1..25: mol_type = other DNA
agagggccatgggtagataggtcaa

SEQ ID NO: 33645 - DNA, 25 bp, synthetic construct
  misc_feature 1..25: note = Oligonucleotide
  source 1..25: mol_type = other DNA
aggagagggccatgggtagataggt

SEQ ID NO: 33646 - DNA, 25 bp, synthetic construct
  misc_feature 1..25: note = Oligonucleotide
  source 1..25: mol_type = other DNA
ggaaggagagggccatgggtagata

SEQ ID NO: 33647 - DNA, 25 bp, synthetic construct
  misc_feature 1..25: note = Oligonucleotide
  source 1..25: mol_type = other DNA
gagggaaggagagggccatgggtag

SEQ ID NO: 33648 - DNA, 25 bp, synthetic construct
  misc_feature 1..25: note = Oligonucleotide
  source 1..25: mol_type = other DNA
agggagggaaggagagggccatggg

SEQ ID NO: 33649 - DNA, 25 bp, synthetic construct
  misc_feature 1..25: note = Oligonucleotide
  source 1..25: mol_type = other DNA
tggagggagggaaggagagggccat

SEQ ID NO: 33650 - DNA, 25 bp, synthetic construct
  misc_feature 1..25: note = Oligonucleotide
  source 1..25: mol_type = other DNA
ggatggagggagggaaggagagggc

SEQ ID NO: 33651 - DNA, 25 bp, synthetic construct
  misc_feature 1..25: note = Oligonucleotide
  source 1..25: mol_type = other DNA
agtggatggagggagggaaggagag

SEQ ID NO: 33652 - DNA, 25 bp, synthetic construct
  misc_feature 1..25: note = Oligonucleotide
  source 1..25: mol_type = other DNA
accagtggatggagggagggaagga

SEQ ID NO: 33653 - DNA, 25 bp, synthetic construct
  misc_feature 1..25: note = Oligonucleotide
  source 1..25: mol_type = other DNA
tggaccagtggatggagggagggaa

SEQ ID NO: 33654 - DNA, 25 bp, synthetic construct
  misc_feature 1..25: note = Oligonucleotide
  source 1..25: mol_type = other DNA
cactggaccagtggatggagggagg

SEQ ID NO: 33655 - DNA, 25 bp, synthetic construct
  misc_feature 1..25: note = Oligonucleotide
  source 1..25: mol_type = other DNA
aggcactggaccagtggatggaggg

SEQ ID NO: 33656 - DNA, 25 bp, synthetic construct
  misc_feature 1..25: note = Oligonucleotide
  source 1..25: mol_type = other DNA
gaaaggcactggaccagtggatgga

SEQ ID NO: 33657 - DNA, 25 bp, synthetic construct
  misc_feature 1..25: note = Oligonucleotide
  source 1..25: mol_type = other DNA
attgaaaggcactggaccagtggat

SEQ ID NO: 33658 - DNA, 25 bp, synthetic construct
  misc_feature 1..25: note = Oligonucleotide
  source 1..25: mol_type = other DNA
tggattgaaaggcactggaccagtg

SEQ ID NO: 33659 - DNA, 25 bp, synthetic construct
  misc_feature 1..25: note = Oligonucleotide
  source 1..25: mol_type = other DNA
gggtggattgaaaggcactggacca

SEQ ID NO: 33660 - DNA, 25 bp, synthetic construct
  misc_feature 1..25: note = Oligonucleotide
  source 1..25: mol_type = other DNA
gaagggtggattgaaaggcactgga

SEQ ID NO: 33661 - DNA, 25 bp, synthetic construct
  misc_feature 1..25: note = Oligonucleotide
  source 1..25: mol_type = other DNA
acagaagggtggattgaaaggcact

SEQ ID NO: 33662 - DNA, 25 bp, synthetic construct
  misc_feature 1..25: note = Oligonucleotide
  source 1..25: mol_type = other DNA
cggacagaagggtggattgaaaggc

SEQ ID NO: 33663 - DNA, 25 bp, synthetic construct
  misc_feature 1..25: note = Oligonucleotide
  source 1..25: mol_type = other DNA
agacggacagaagggtggattgaaa

SEQ ID NO: 33664 - DNA, 25 bp, synthetic construct
  misc_feature 1..25: note = Oligonucleotide
  source 1..25: mol_type = other DNA
gatagacggacagaagggtggattg

SEQ ID NO: 33665 - DNA, 25 bp, synthetic construct
  misc_feature 1..25: note = Oligonucleotide
  source 1..25: mol_type = other DNA
tgagatagacggacagaagggtgga

SEQ ID NO: 33666 - DNA, 25 bp, synthetic construct
  misc_feature 1..25: note = Oligonucleotide
  source 1..25: mol_type = other DNA
atctgagatagacggacagaagggt

SEQ ID NO: 33667 - DNA, 25 bp, synthetic construct
  misc_feature 1..25: note = Oligonucleotide
  source 1..25: mol_type = other DNA
tgcatctgagatagacggacagaag

SEQ ID NO: 33668 - DNA, 25 bp, synthetic construct
  misc_feature 1..25: note = Oligonucleotide
  source 1..25: mol_type = other DNA
aggtgcatctgagatagacggacag

SEQ ID NO: 33669 - DNA, 25 bp, synthetic construct
  misc_feature 1..25: note = Oligonucleotide
  source 1..25: mol_type = other DNA
gacaggtgcatctgagatagacgga

SEQ ID NO: 33670 - DNA, 25 bp, synthetic construct
  misc_feature 1..25: note = Oligonucleotide
  source 1..25: mol_type = other DNA
gtggacaggtgcatctgagatagac

SEQ ID NO: 33671 - DNA, 25 bp, synthetic construct
  misc_feature 1..25: note = Oligonucleotide
  source 1..25: mol_type = other DNA
atggtggacaggtgcatctgagata

SEQ ID NO: 33672 - DNA, 25 bp, synthetic construct
  misc_feature 1..25: note = Oligonucleotide
  source 1..25: mol_type = other DNA
taaatggtggacaggtgcatctgag

SEQ ID NO: 33673 - DNA, 25 bp, synthetic construct
  misc_feature 1..25: note = Oligonucleotide
  source 1..25: mol_type = other DNA
gagtaaatggtggacaggtgcatct

SEQ ID NO: 33674 - DNA, 25 bp, synthetic construct
  misc_feature 1..25: note = Oligonucleotide
  source 1..25: mol_type = other DNA
ggagagtaaatggtggacaggtgca

SEQ ID NO: 33675 - DNA, 25 bp, synthetic construct
  misc_feature 1..25: note = Oligonucleotide
  source 1..25: mol_type = other DNA
ctaggagagtaaatggtggacaggt

SEQ ID NO: 33676 - DNA, 25 bp, synthetic construct
  misc_feature 1..25: note = Oligonucleotide
  source 1..25: mol_type = other DNA
tgactaggagagtaaatggtggaca

SEQ ID NO: 33677 - DNA, 25 bp, synthetic construct
  misc_feature 1..25: note = Oligonucleotide
  source 1..25: mol_type = other DNA
tgctgactaggagagtaaatggtgg

SEQ ID NO: 33678 - DNA, 25 bp, synthetic construct
  misc_feature 1..25: note = Oligonucleotide
  source 1..25: mol_type = other DNA
ggatgctgactaggagagtaaatgg

SEQ ID NO: 33679 - DNA, 25 bp, synthetic construct
  misc_feature 1..25: note = Oligonucleotide
  source 1..25: mol_type = other DNA
aagggatgctgactaggagagtaaa

SEQ ID NO: 33680 - DNA, 25 bp, synthetic construct
  misc_feature 1..25: note = Oligonucleotide
  source 1..25: mol_type = other DNA
cagaagggatgctgactaggagagt

SEQ ID NO: 33681 - DNA, 25 bp, synthetic construct
  misc_feature 1..25: note = Oligonucleotide
  source 1..25: mol_type = other DNA
ggacagaagggatgctgactaggag

SEQ ID NO: 33682 - DNA, 25 bp, synthetic construct
  misc_feature 1..25: note = Oligonucleotide
  source 1..25: mol_type = other DNA
gacggacagaagggatgctgactag

SEQ ID NO: 33683 - DNA, 25 bp, synthetic construct
  misc_feature 1..25: note = Oligonucleotide
  source 1..25: mol_type = other DNA
atagacggacagaagggatgctgac

SEQ ID NO: 33684 - DNA, 25 bp, synthetic construct
  misc_feature 1..25: note = Oligonucleotide
  source 1..25: mol_type = other DNA
gagatagacggacagaagggatgct

SEQ ID NO: 33685 - DNA, 25 bp, synthetic construct
  misc_feature 1..25: note = Oligonucleotide
  source 1..25: mol_type = other DNA
tctgagatagacggacagaagggat

SEQ ID NO: 33686 - DNA, 25 bp, synthetic construct
  misc_feature 1..25: note = Oligonucleotide
  source 1..25: mol_type = other DNA
gcatctgagatagacggacagaagg

SEQ ID NO: 33687 - DNA, 25 bp, synthetic construct
  misc_feature 1..25: note = Oligonucleotide
  source 1..25: mol_type = other DNA
ggtgcatctgagatagacggacaga

SEQ ID NO: 33688 - DNA, 25 bp, synthetic construct
  misc_feature 1..25: note = Oligonucleotide
  source 1..25: mol_type = other DNA
acaggtgcatctgagatagacggac

SEQ ID NO: 33689 - DNA, 25 bp, synthetic construct
  misc_feature 1..25: note = Oligonucleotide
  source 1..25: mol_type = other DNA
tggacaggtgcatctgagatagacg

SEQ ID NO: 33690 - DNA, 25 bp, synthetic construct
  misc_feature 1..25: note = Oligonucleotide
  source 1..25: mol_type = other DNA
tggtggacaggtgcatctgagatag

SEQ ID NO: 33691 - DNA, 25 bp, synthetic construct
  misc_feature 1..25: note = Oligonucleotide
  source 1..25: mol_type = other DNA
aaatggtggacaggtgcatctgaga

SEQ ID NO: 33692 - DNA, 25 bp, synthetic construct
  misc_feature 1..25: note = Oligonucleotide
  source 1..25: mol_type = other DNA
agtaaatggtggacaggtgcatctg

SEQ ID NO: 33693 - DNA, 25 bp, synthetic construct
  misc_feature 1..25: note = Oligonucleotide
  source 1..25: mol_type = other DNA
gagagtaaatggtggacaggtgcat

SEQ ID NO: 33694 - DNA, 25 bp, synthetic construct
  misc_feature 1..25: note = Oligonucleotide
  source 1..25: mol_type = other DNA
taggagagtaaatggtggacaggtg

SEQ ID NO: 33695 - DNA, 25 bp, synthetic construct
  misc_feature 1..25: note = Oligonucleotide
  source 1..25: mol_type = other DNA
gactaggagagtaaatggtggacag

SEQ ID NO: 33696 - DNA, 25 bp, synthetic construct
  misc_feature 1..25: note = Oligonucleotide
  source 1..25: mol_type = other DNA
gctgactaggagagtaaatggtgga

SEQ ID NO: 33697 - DNA, 25 bp, synthetic construct
  misc_feature 1..25: note = Oligonucleotide
  source 1..25: mol_type = other DNA
catgctgactaggagagtaaatggt

SEQ ID NO: 33698 - DNA, 25 bp, synthetic construct
  misc_feature 1..25: note = Oligonucleotide
  source 1..25: mol_type = other DNA
ctgcatgctgactaggagagtaaat

SEQ ID NO: 33699 - DNA, 25 bp, synthetic construct
  misc_feature 1..25: note = Oligonucleotide
  source 1..25: mol_type = other DNA
attctgcatgctgactaggagagta

SEQ ID NO: 33700 - DNA, 25 bp, synthetic construct
  misc_feature 1..25: note = Oligonucleotide
  source 1..25: mol_type = other DNA
ggcattctgcatgctgactaggaga

SEQ ID NO: 33701 - DNA, 25 bp, synthetic construct
  misc_feature 1..25: note = Oligonucleotide
  source 1..25: mol_type = other DNA
acaggcattctgcatgctgactagg

SEQ ID NO: 33702 - DNA, 25 bp, synthetic construct
  misc_feature 1..25: note = Oligonucleotide
  source 1..25: mol_type = other DNA
gtcacaggcattctgcatgctgact

SEQ ID NO: 33703 - DNA, 25 bp, synthetic construct
  misc_feature 1..25: note = Oligonucleotide
  source 1..25: mol_type = other DNA
cacgtcacaggcattctgcatgctg

SEQ ID NO: 33704 - DNA, 25 bp, synthetic construct
  misc_feature 1..25: note = Oligonucleotide
  source 1..25: mol_type = other DNA
tggcacgtcacaggcattctgcatg

SEQ ID NO: 33705 - DNA, 25 bp, synthetic construct
  misc_feature 1..25: note = Oligonucleotide
  source 1..25: mol_type = other DNA
acctggcacgtcacaggcattctgc

SEQ ID NO: 33706 - DNA, 25 bp, synthetic construct
  misc_feature 1..25: note = Oligonucleotide
  source 1..25: mol_type = other DNA
agcacctggcacgtcacaggcattc

SEQ ID NO: 33707 - DNA, 25 bp, synthetic construct
  misc_feature 1..25: note = Oligonucleotide
  source 1..25: mol_type = other DNA
cacagcacctggcacgtcacaggca

SEQ ID NO: 33708 - DNA, 25 bp, synthetic construct
  misc_feature 1..25: note = Oligonucleotide
  source 1..25: mol_type = other DNA
cagcacagcacctggcacgtcacag

SEQ ID NO: 33709 - DNA, 25 bp, synthetic construct
  misc_feature 1..25: note = Oligonucleotide
  source 1..25: mol_type = other DNA
acccagcacagcacctggcacgtca

SEQ ID NO: 33710 - DNA, 25 bp, synthetic construct
  misc_feature 1..25: note = Oligonucleotide
  source 1..25: mol_type = other DNA
agcacccagcacagcacctggcacg

SEQ ID NO: 33711 - DNA, 25 bp, synthetic construct
  misc_feature 1..25: note = Oligonucleotide
  source 1..25: mol_type = other DNA
cctagcacccagcacagcacctggc

SEQ ID NO: 33712 - DNA, 25 bp, synthetic construct
  misc_feature 1..25: note = Oligonucleotide
  source 1..25: mol_type = other DNA
gatcctagcacccagcacagcacct

SEQ ID NO: 33713 - DNA, 25 bp, synthetic construct
  misc_feature 1..25: note = Oligonucleotide
  source 1..25: mol_type = other DNA
tgtgatcctagcacccagcacagca

SEQ ID NO: 33714 - DNA, 25 bp, synthetic construct
  misc_feature 1..25: note = Oligonucleotide
  source 1..25: mol_type = other DNA
ctctgtgatcctagcacccagcaca

SEQ ID NO: 33715 - DNA, 25 bp, synthetic construct
  misc_feature 1..25: note = Oligonucleotide
  source 1..25: mol_type = other DNA
tatctctgtgatcctagcacccagc

SEQ ID NO: 33716 - DNA, 25 bp, synthetic construct
  misc_feature 1..25: note = Oligonucleotide
  source 1..25: mol_type = other DNA
ctttatctctgtgatcctagcaccc

SEQ ID NO: 33717 - DNA, 25 bp, synthetic construct
  misc_feature 1..25: note = Oligonucleotide
  source 1..25: mol_type = other DNA
gttctttatctctgtgatcctagca

SEQ ID NO: 33718 - DNA, 25 bp, synthetic construct
  misc_feature 1..25: note = Oligonucleotide
  source 1..25: mol_type = other DNA
catgttctttatctctgtgatccta

SEQ ID NO: 33719 - DNA, 25 bp, synthetic construct
  misc_feature 1..25: note = Oligonucleotide
  source 1..25: mol_type = other DNA
ccacatgttctttatctctgtgatc

SEQ ID NO: 33720 - DNA, 25 bp, synthetic construct
  misc_feature 1..25: note = Oligonucleotide
  source 1..25: mol_type = other DNA
gggccacatgttctttatctctgtg

SEQ ID NO: 33721 - DNA, 25 bp, synthetic construct
  misc_feature 1..25: note = Oligonucleotide
  source 1..25: mol_type = other DNA
taagggccacatgttctttatctct

SEQ ID NO: 33722 - DNA, 25 bp, synthetic construct
  misc_feature 1..25: note = Oligonucleotide
  source 1..25: mol_type = other DNA
gggtaagggccacatgttctttatc

SEQ ID NO: 33723 - DNA, 25 bp, synthetic construct
  misc_feature 1..25: note = Oligonucleotide
  source 1..25: mol_type = other DNA
tgagggtaagggccacatgttcttt

SEQ ID NO: 33724 - DNA, 25 bp, synthetic construct
  misc_feature 1..25: note = Oligonucleotide
  source 1..25: mol_type = other DNA
ccttgagggtaagggccacatgttc

SEQ ID NO: 33725 - DNA, 25 bp, synthetic construct
  misc_feature 1..25: note = Oligonucleotide
  source 1..25: mol_type = other DNA
gctccttgagggtaagggccacatg

SEQ ID NO: 33726 - DNA, 25 bp, synthetic construct
  misc_feature 1..25: note = Oligonucleotide
  source 1..25: mol_type = other DNA
tgagctccttgagggtaagggccac

SEQ ID NO: 33727 - DNA, 25 bp, synthetic construct
  misc_feature 1..25: note = Oligonucleotide
  source 1..25: mol_type = other DNA
ttgtgagctccttgagggtaagggc

SEQ ID NO: 33728 - DNA, 25 bp, synthetic construct
  misc_feature 1..25: note = Oligonucleotide
  source 1..25: mol_type = other DNA
taattgtgagctccttgagggtaag

SEQ ID NO: 33729 - DNA, 25 bp, synthetic construct
  misc_feature 1..25: note = Oligonucleotide
  source 1..25: mol_type = other DNA
cactaattgtgagctccttgagggt

SEQ ID NO: 33730 - DNA, 25 bp, synthetic construct
  misc_feature 1..25: note = Oligonucleotide
  source 1..25: mol_type = other DNA
ccccactaattgtgagctccttgag

SEQ ID NO: 33731 - DNA, 25 bp, synthetic construct
  misc_feature 1..25: note = Oligonucleotide
  source 1..25: mol_type = other DNA
ttcccccactaattgtgagctcctt

SEQ ID NO: 33732 - DNA, 25 bp, synthetic construct
  misc_feature 1..25: note = Oligonucleotide
  source 1..25: mol_type = other DNA
tgtttcccccactaattgtgagctc

SEQ ID NO: 33733 - DNA, 25 bp, synthetic construct
  misc_feature 1..25: note = Oligonucleotide
  source 1..25: mol_type = other DNA
acctgtttcccccactaattgtgag

SEQ ID NO: 33734 - DNA, 25 bp, synthetic construct
  misc_feature 1..25: note = Oligonucleotide
  source 1..25: mol_type = other DNA
atgacctgtttcccccactaattgt

SEQ ID NO: 33735 - DNA, 25 bp, synthetic construct
  misc_feature 1..25: note = Oligonucleotide
  source 1..25: mol_type = other DNA
tcgatgacctgtttcccccactaat

SEQ ID NO: 33736 - DNA, 25 bp, synthetic construct
  misc_feature 1..25: note = Oligonucleotide
  source 1..25: mol_type = other DNA
ctttcgatgacctgtttcccccact

SEQ ID NO: 33737 - DNA, 25 bp, synthetic construct
  misc_feature 1..25: note = Oligonucleotide
  source 1..25: mol_type = other DNA
cagctttcgatgacctgtttccccc

SEQ ID NO: 33738 - DNA, 25 bp, synthetic construct
  misc_feature 1..25: note = Oligonucleotide
  source 1..25: mol_type = other DNA
ctgcagctttcgatgacctgtttcc

SEQ ID NO: 33739 - DNA, 25 bp, synthetic construct
  misc_feature 1..25: note = Oligonucleotide
  source 1..25: mol_type = other DNA
aacctgcagctttcgatgacctgtt

SEQ ID NO: 33740 - DNA, 25 bp, synthetic construct
  misc_feature 1..25: note = Oligonucleotide
  source 1..25: mol_type = other DNA
gataacctgcagctttcgatgacct

SEQ ID NO: 33741 - DNA, 25 bp, synthetic construct
  misc_feature 1..25: note = Oligonucleotide
  source 1..25: mol_type = other DNA
aaagataacctgcagctttcgatga

SEQ ID NO: 33742 - DNA, 25 bp, synthetic construct
  misc_feature 1..25: note = Oligonucleotide
  source 1..25: mol_type = other DNA
cagaaagataacctgcagctttcga

SEQ ID NO: 33743 - DNA, 25 bp, synthetic construct
  misc_feature 1..25: note = Oligonucleotide
  source 1..25: mol_type = other DNA
gatcagaaagataacctgcagcttt

SEQ ID NO: 33744 - DNA, 25 bp, synthetic construct
  misc_feature 1..25: note = Oligonucleotide
  source 1..25: mol_type = other DNA
tgagatcagaaagataacctgcagc

SEQ ID NO: 33745 - DNA, 25 bp, synthetic construct
  misc_feature 1..25: note = Oligonucleotide
  source 1..25: mol_type = other DNA
aaatgagatcagaaagataacctgc

SEQ ID NO: 33746 - DNA, 25 bp, synthetic construct
  misc_feature 1..25: note = Oligonucleotide
  source 1..25: mol_type = other DNA
aggaaatgagatcagaaagataacc

SEQ ID NO: 33747 - DNA, 25 bp, synthetic construct
  misc_feature 1..25: note = Oligonucleotide
  source 1..25: mol_type = other DNA
ggcaggaaatgagatcagaaagata

SEQ ID NO: 33748 - DNA, 25 bp, synthetic construct
  misc_feature 1..25: note = Oligonucleotide
  source 1..25: mol_type = other DNA
agtggcaggaaatgagatcagaaag

SEQ ID NO: 33749 - DNA, 25 bp, synthetic construct
  misc_feature 1..25: note = Oligonucleotide
  source 1..25: mol_type = other DNA
gagagtggcaggaaatgagatcaga

SEQ ID NO: 33750 - DNA, 25 bp, synthetic construct
  misc_feature 1..25: note = Oligonucleotide
  source 1..25: mol_type = other DNA
agagagagtggcaggaaatgagatc

SEQ ID NO: 33751 - DNA, 25 bp, synthetic construct
  misc_feature 1..25: note = Oligonucleotide
  source 1..25: mol_type = other DNA
gctagagagagtggcaggaaatgag

SEQ ID NO: 33752 - DNA, 25 bp, synthetic construct
  misc_feature 1..25: note = Oligonucleotide
  source 1..25: mol_type = other DNA
ggagctagagagagtggcaggaaat

SEQ ID NO: 33753 - DNA, 25 bp, synthetic construct
  misc_feature 1..25: note = Oligonucleotide
  source 1..25: mol_type = other DNA
gagggagctagagagagtggcagga

SEQ ID NO: 33754 - DNA, 25 bp, synthetic construct
  misc_feature 1..25: note = Oligonucleotide
  source 1..25: mol_type = other DNA
gcagagggagctagagagagtggca

SEQ ID NO: 33755 - DNA, 25 bp, synthetic construct
  misc_feature 1..25: note = Oligonucleotide
  source 1..25: mol_type = other DNA
ggagcagagggagctagagagagtg

SEQ ID NO: 33756 - DNA, 25 bp, synthetic construct
  misc_feature 1..25: note = Oligonucleotide
  source 1..25: mol_type = other DNA
gctggagcagagggagctagagaga

SEQ ID NO: 33757 - DNA, 25 bp, synthetic construct
  misc_feature 1..25: note = Oligonucleotide
  source 1..25: mol_type = other DNA
gcagctggagcagagggagctagag

SEQ ID NO: 33758 - DNA, 25 bp, synthetic construct
  misc_feature 1..25: note = Oligonucleotide
  source 1..25: mol_type = other DNA
tgtgcagctggagcagagggagcta

SEQ ID NO: 33759 - DNA, 25 bp, synthetic construct
  misc_feature 1..25: note = Oligonucleotide
  source 1..25: mol_type = other DNA
gcctgtgcagctggagcagagggag

SEQ ID NO: 33760 - DNA, 25 bp, synthetic construct
  misc_feature 1..25: note = Oligonucleotide
  source 1..25: mol_type = other DNA
agagcctgtgcagctggagcagagg

SEQ ID NO: 33761 - DNA, 25 bp, synthetic construct
  misc_feature 1..25: note = Oligonucleotide
  source 1..25: mol_type = other DNA
ttcagagcctgtgcagctggagcag

SEQ ID NO: 33762 - DNA, 25 bp, synthetic construct
  misc_feature 1..25: note = Oligonucleotide
  source 1..25: mol_type = other DNA
gagttcagagcctgtgcagctggag

SEQ ID NO: 33763 - DNA, 25 bp, synthetic construct
  misc_feature 1..25: note = Oligonucleotide
  source 1..25: mol_type = other DNA
agagagttcagagcctgtgcagctg

SEQ ID NO: 33764 - DNA, 25 bp, synthetic construct
  misc_feature 1..25: note = Oligonucleotide
  source 1..25: mol_type = other DNA
ttgagagagttcagagcctgtgcag

SEQ ID NO: 33765 - DNA, 25 bp, synthetic construct
  misc_feature 1..25: note = Oligonucleotide
  source 1..25: mol_type = other DNA
catttgagagagttcagagcctgtg

SEQ ID NO: 33766 - DNA, 25 bp, synthetic construct
  misc_feature 1..25: note = Oligonucleotide
  source 1..25: mol_type = other DNA
cagcatttgagagagttcagagcct

SEQ ID NO: 33767 - DNA, 25 bp, synthetic construct
  misc_feature 1..25: note = Oligonucleotide
  source 1..25: mol_type = other DNA
ctgcagcatttgagagagttcagag

SEQ ID NO: 33768 - DNA, 25 bp, synthetic construct
  misc_feature 1..25: note = Oligonucleotide
  source 1..25: mol_type = other DNA
agcctgcagcatttgagagagttca

SEQ ID NO: 33769 - DNA, 25 bp, synthetic construct
  misc_feature 1..25: note = Oligonucleotide
  source 1..25: mol_type = other DNA
atcagcctgcagcatttgagagagt

SEQ ID NO: 33770 - DNA, 25 bp, synthetic construct
  misc_feature 1..25: note = Oligonucleotide
  source 1..25: mol_type = other DNA
ggcatcagcctgcagcatttgagag

SEQ ID NO: 33771 - DNA, 25 bp, synthetic construct
  misc_feature 1..25: note = Oligonucleotide
  source 1..25: mol_type = other DNA
gcaggcatcagcctgcagcatttga

SEQ ID NO: 33772 - DNA, 25 bp, synthetic construct
  misc_feature 1..25: note = Oligonucleotide
  source 1..25: mol_type = other DNA
acggcaggcatcagcctgcagcatt

SEQ ID NO: 33773 - DNA, 25 bp, synthetic construct
  misc_feature 1..25: note = Oligonucleotide
  source 1..25: mol_type = other DNA
cccacggcaggcatcagcctgcagc

SEQ ID NO: 33774 - DNA, 25 bp, synthetic construct
  misc_feature 1..25: note = Oligonucleotide
  source 1..25: mol_type = other DNA
aagcccacggcaggcatcagcctgc

SEQ ID NO: 33775 - DNA, 25 bp, synthetic construct
  misc_feature 1..25: note = Oligonucleotide
  source 1..25: mol_type = other DNA
gggaagcccacggcaggcatcagcc

SEQ ID NO: 33776 - DNA, 25 bp, synthetic construct
  misc_feature 1..25: note = Oligonucleotide
  source 1..25: mol_type = other DNA
caggggaagcccacggcaggcatca

SEQ ID NO: 33777 - DNA, 25 bp, synthetic construct
  misc_feature 1..25: note = Oligonucleotide
  source 1..25: mol_type = other DNA
ggtcaggggaagcccacggcaggca

SEQ ID NO: 33778 - DNA, 25 bp, synthetic construct
  misc_feature 1..25: note = Oligonucleotide
  source 1..25: mol_type = other DNA
ggtggtcaggggaagcccacggcag

SEQ ID NO: 33779 - DNA, 25 bp, synthetic construct
  misc_feature 1..25: note = Oligonucleotide
  source 1..25: mol_type = other DNA
gggggtggtcaggggaagcccacgg

SEQ ID NO: 33780 - DNA, 25 bp, synthetic construct
  misc_feature 1..25: note = Oligonucleotide
  source 1..25: mol_type = other DNA
agcgggggtggtcaggggaagccca

SEQ ID NO: 33781 - DNA, 25 bp, synthetic construct
  misc_feature 1..25: note = Oligonucleotide
  source 1..25: mol_type = other DNA
aggagcgggggtggtcaggggaagc

SEQ ID NO: 33782 - DNA, 25 bp, synthetic construct
  misc_feature 1..25: note = Oligonucleotide
  source 1..25: mol_type = other DNA
cccaggagcgggggtggtcagggga

SEQ ID NO: 33783 - DNA, 25 bp, synthetic construct
  misc_feature 1..25: note = Oligonucleotide
  source 1..25: mol_type = other DNA
cttcccaggagcgggggtggtcagg

SEQ ID NO: 33784 - DNA, 25 bp, synthetic construct
  misc_feature 1..25: note = Oligonucleotide
  source 1..25: mol_type = other DNA
gggcttcccaggagcgggggtggtc

SEQ ID NO: 33785 - DNA, 25 bp, synthetic construct
  misc_feature 1..25: note = Oligonucleotide
  source 1..25: mol_type = other DNA
aaagggcttcccaggagcgggggtg

SEQ ID NO: 33786 - DNA, 25 bp, synthetic construct
  misc_feature 1..25: note = Oligonucleotide
  source 1..25: mol_type = other DNA
ggcaaagggcttcccaggagcgggg

SEQ ID NO: 33787 - DNA, 25 bp, synthetic construct
  misc_feature 1..25: note = Oligonucleotide
  source 1..25: mol_type = other DNA
gtgggcaaagggcttcccaggagcg

SEQ ID NO: 33788 - DNA, 25 bp, synthetic construct
  misc_feature 1..25: note = Oligonucleotide
  source 1..25: mol_type = other DNA
tatgtgggcaaagggcttcccagga

SEQ ID NO: 33789 - DNA, 25 bp, synthetic construct
  misc_feature 1..25: note = Oligonucleotide
  source 1..25: mol_type = other DNA
ggatatgtgggcaaagggcttccca

SEQ ID NO: 33790 - DNA, 25 bp, synthetic construct
  misc_feature 1..25: note = Oligonucleotide
  source 1..25: mol_type = other DNA
tgtggatatgtgggcaaagggcttc

SEQ ID NO: 33791 - DNA, 25 bp, synthetic construct
  misc_feature 1..25: note = Oligonucleotide
  source 1..25: mol_type = other DNA
gcctgtggatatgtgggcaaagggc

SEQ ID NO: 33792 - DNA, 25 bp, synthetic construct
  misc_feature 1..25: note = Oligonucleotide
  source 1..25: mol_type = other DNA
gcagcctgtggatatgtgggcaaag

SEQ ID NO: 33793 - DNA, 25 bp, synthetic construct
  misc_feature 1..25: note = Oligonucleotide
  source 1..25: mol_type = other DNA
ggagcagcctgtggatatgtgggca

SEQ ID NO: 33794 - DNA, 25 bp, synthetic construct
  misc_feature 1..25: note = Oligonucleotide
  source 1..25: mol_type = other DNA
tggggagcagcctgtggatatgtgg

SEQ ID NO: 33795 - DNA, 25 bp, synthetic construct
  misc_feature 1..25: note = Oligonucleotide
  source 1..25: mol_type = other DNA
ggatggggagcagcctgtggatatg

SEQ ID NO: 33796 - DNA, 25 bp, synthetic construct
  misc_feature 1..25: note = Oligonucleotide
  source 1..25: mol_type = other DNA
tgaggatggggagcagcctgtggat

SEQ ID NO: 33797 - DNA, 25 bp, synthetic construct
  misc_feature 1..25: note = Oligonucleotide
  source 1..25: mol_type = other DNA
ggctgaggatggggagcagcctgtg

SEQ ID NO: 33798 - DNA, 25 bp, synthetic construct
  misc_feature 1..25: note = Oligonucleotide
  source 1..25: mol_type = other DNA
agaggctgaggatggggagcagcct

SEQ ID NO: 33799 - DNA, 25 bp, synthetic construct
  misc_feature 1..25: note = Oligonucleotide
  source 1..25: mol_type = other DNA
agcagaggctgaggatggggagcag

SEQ ID NO: 33800 - DNA, 25 bp, synthetic construct
  misc_feature 1..25: note = Oligonucleotide
  source 1..25: mol_type = other DNA
ctgagcagaggctgaggatggggag

SEQ ID NO: 33801 - DNA, 25 bp, synthetic construct
  misc_feature 1..25: note = Oligonucleotide
  source 1..25: mol_type = other DNA
gggctgagcagaggctgaggatggg

SEQ ID NO: 33802 - DNA, 25 bp, synthetic construct
  misc_feature 1..25: note = Oligonucleotide
  source 1..25: mol_type = other DNA
ggagggctgagcagaggctgaggat

SEQ ID NO: 33803 - DNA, 25 bp, synthetic construct
  misc_feature 1..25: note = Oligonucleotide
  source 1..25: mol_type = other DNA
acgggagggctgagcagaggctgag

SEQ ID NO: 33804 - DNA, 25 bp, synthetic construct
  misc_feature 1..25: note = Oligonucleotide
  source 1..25: mol_type = other DNA
cccacgggagggctgagcagaggct

SEQ ID NO: 33805 - DNA, 25 bp, synthetic construct
  misc_feature 1..25: note = Oligonucleotide
  source 1..25: mol_type = other DNA
acccccacgggagggctgagcagag

SEQ ID NO: 33806 - DNA, 25 bp, synthetic construct
  misc_feature 1..25: note = Oligonucleotide
  source 1..25: mol_type = other DNA
ctcacccccacgggagggctgagca

SEQ ID NO: 33807 - DNA, 25 bp, synthetic construct
  misc_feature 1..25: note = Oligonucleotide
  source 1..25: mol_type = other DNA
ggcctcacccccacgggagggctga

SEQ ID NO: 33808 - DNA, 25 bp, synthetic construct
  misc_feature 1..25: note = Oligonucleotide
  source 1..25: mol_type = other DNA
aaaggcctcacccccacgggagggc

SEQ ID NO: 33809 - DNA, 25 bp, synthetic construct
  misc_feature 1..25: note = Oligonucleotide
  source 1..25: mol_type = other DNA
cgcaaaggcctcacccccacgggag

SEQ ID NO: 33810 - DNA, 25 bp, synthetic construct
  misc_feature 1..25: note = Oligonucleotide
  source 1..25: mol_type = other DNA
gcacgcaaaggcctcacccccacgg

SEQ ID NO: 33811 - DNA, 25 bp, synthetic construct
  misc_feature 1..25: note = Oligonucleotide
  source 1..25: mol_type = other DNA
aaggcacgcaaaggcctcaccccca

SEQ ID NO: 33812 - DNA, 25 bp, synthetic construct
  misc_feature 1..25: note = Oligonucleotide
  source 1..25: mol_type = other DNA
agaaaggcacgcaaaggcctcaccc

SEQ ID NO: 33813 - DNA, 25 bp, synthetic construct
  misc_feature 1..25: note = Oligonucleotide
  source 1..25: mol_type = other DNA
cagagaaaggcacgcaaaggcctca

SEQ ID NO: 33814 - DNA, 25 bp, synthetic construct
  misc_feature 1..25: note = Oligonucleotide
  source 1..25: mol_type = other DNA
gggcagagaaaggcacgcaaaggcc

SEQ ID NO: 33815 - DNA, 25 bp, synthetic construct
  misc_feature 1..25: note = Oligonucleotide
  source 1..25: mol_type = other DNA
ggagggcagagaaaggcacgcaaag

SEQ ID NO: 33816 - DNA, 25 bp, synthetic construct
  misc_feature 1..25: note = Oligonucleotide
  source 1..25: mol_type = other DNA
cagggagggcagagaaaggcacgca

SEQ ID NO: 33817 - DNA, 25 bp, synthetic construct
  misc_feature 1..25: note = Oligonucleotide
  source 1..25: mol_type = other DNA
gatcagggagggcagagaaaggcac

SEQ ID NO: 33818 - DNA, 25 bp, synthetic construct
  misc_feature 1..25: note = Oligonucleotide
  source 1..25: mol_type = other DNA
gcagatcagggagggcagagaaagg

SEQ ID NO: 33819 - DNA, 25 bp, synthetic construct
  misc_feature 1..25: note = Oligonucleotide
  source 1..25: mol_type = other DNA
cgagcagatcagggagggcagagaa

SEQ ID NO: 33820 - DNA, 25 bp, synthetic construct
  misc_feature 1..25: note = Oligonucleotide
  source 1..25: mol_type = other DNA
cagcgagcagatcagggagggcaga

SEQ ID NO: 33821 - DNA, 25 bp, synthetic construct
  misc_feature 1..25: note = Oligonucleotide
  source 1..25: mol_type = other DNA
gaccagcgagcagatcagggagggc

SEQ ID NO: 33822 - DNA, 25 bp, synthetic construct
  misc_feature 1..25: note = Oligonucleotide
  source 1..25: mol_type = other DNA
ggagaccagcgagcagatcagggag

SEQ ID NO: 33823 - DNA, 25 bp, synthetic construct
  misc_feature 1..25: note = Oligonucleotide
  source 1..25: mol_type = other DNA
tcaggagaccagcgagcagatcagg

SEQ ID NO: 33824 - DNA, 25 bp, synthetic construct
  misc_feature 1..25: note = Oligonucleotide
  source 1..25: mol_type = other DNA
tgctcaggagaccagcgagcagatc

SEQ ID NO: 33825 - DNA, 25 bp, synthetic construct
  misc_feature 1..25: note = Oligonucleotide
  source 1..25: mol_type = other DNA
aagtgctcaggagaccagcgagcag

SEQ ID NO: 33826 - DNA, 25 bp, synthetic construct
  misc_feature 1..25: note = Oligonucleotide
  source 1..25: mol_type = other DNA
ggcaagtgctcaggagaccagcgag

SEQ ID NO: 33827 - DNA, 25 bp, synthetic construct
  misc_feature 1..25: note = Oligonucleotide
  source 1..25: mol_type = other DNA
gctggcaagtgctcaggagaccagc

SEQ ID NO: 33828 - DNA, 25 bp, synthetic construct
  misc_feature 1..25: note = Oligonucleotide
  source 1..25: mol_type = other DNA
aatgctggcaagtgctcaggagacc

SEQ ID NO: 33829 - DNA, 25 bp, synthetic construct
  misc_feature 1..25: note = Oligonucleotide
  source 1..25: mol_type = other DNA
gcgaatgctggcaagtgctcaggag

SEQ ID NO: 33830 - DNA, 25 bp, synthetic construct
  misc_feature 1..25: note = Oligonucleotide
  source 1..25: mol_type = other DNA
catgcgaatgctggcaagtgctcag

SEQ ID NO: 33831 - DNA, 25 bp, synthetic construct
  misc_feature 1..25: note = Oligonucleotide
  source 1..25: mol_type = other DNA
tagcatgcgaatgctggcaagtgct

SEQ ID NO: 33832 - DNA, 25 bp, synthetic construct
  misc_feature 1..25: note = Oligonucleotide
  source 1..25: mol_type = other DNA
acatagcatgcgaatgctggcaagt

SEQ ID NO: 33833 - DNA, 25 bp, synthetic construct
  misc_feature 1..25: note = Oligonucleotide
  source 1..25: mol_type = other DNA
aagacatagcatgcgaatgctggca

SEQ ID NO: 33834 - DNA, 25 bp, synthetic construct
  misc_feature 1..25: note = Oligonucleotide
  source 1..25: mol_type = other DNA
ataaagacatagcatgcgaatgctg

SEQ ID NO: 33835 - DNA, 25 bp, synthetic construct
  misc_feature 1..25: note = Oligonucleotide
  source 1..25: mol_type = other DNA
aggataaagacatagcatgcgaatg

SEQ ID NO: 33836 - DNA, 25 bp, synthetic construct
  misc_feature 1..25: note = Oligonucleotide
  source 1..25: mol_type = other DNA
cagaggataaagacatagcatgcga

SEQ ID NO: 33837 - DNA, 25 bp, synthetic construct
  misc_feature 1..25: note = Oligonucleotide
  source 1..25: mol_type = other DNA
aaacagaggataaagacatagcatg

SEQ ID NO: 33838 - DNA, 25 bp, synthetic construct
  misc_feature 1..25: note = Oligonucleotide
  source 1..25: mol_type = other DNA
gataaacagaggataaagacatagc

SEQ ID NO: 33839 - DNA, 25 bp, synthetic construct
  misc_feature 1..25: note = Oligonucleotide
  source 1..25: mol_type = other DNA
caggataaacagaggataaagacat

SEQ ID NO: 33840 - DNA, 25 bp, synthetic construct
  misc_feature 1..25: note = Oligonucleotide
  source 1..25: mol_type = other DNA
agacaggataaacagaggataaaga

SEQ ID NO: 33841 - DNA, 25 bp, synthetic construct
  misc_feature 1..25: note = Oligonucleotide
  source 1..25: mol_type = other DNA
gggagacaggataaacagaggataa

SEQ ID NO: 33842 - DNA, 25 bp, synthetic construct
  misc_feature 1..25: note = Oligonucleotide
  source 1..25: mol_type = other DNA
tctgggagacaggataaacagagga

SEQ ID NO: 33843 - DNA, 25 bp, synthetic construct
  misc_feature 1..25: note = Oligonucleotide
  source 1..25: mol_type = other DNA
tgttctgggagacaggataaacaga

SEQ ID NO: 33844 - DNA, 25 bp, synthetic construct
  misc_feature 1..25: note = Oligonucleotide
  source 1..25: mol_type = other DNA
atctgttctgggagacaggataaac

SEQ ID NO: 33845 - DNA, 25 bp, synthetic construct
  misc_feature 1..25: note = Oligonucleotide
  source 1..25: mol_type = other DNA
ataatctgttctgggagacaggata

SEQ ID NO: 33846 - DNA, 25 bp, synthetic construct
  misc_feature 1..25: note = Oligonucleotide
  source 1..25: mol_type = other DNA
tttataatctgttctgggagacagg

SEQ ID NO: 33847 - DNA, 25 bp, synthetic construct
  misc_feature 1..25: note = Oligonucleotide
  source 1..25: mol_type = other DNA
gggtttataatctgttctgggagac

SEQ ID NO: 33848 - DNA, 25 bp, synthetic construct
  misc_feature 1..25: note = Oligonucleotide
  source 1..25: mol_type = other DNA
gtggggtttataatctgttctggga

SEQ ID NO: 33849 - DNA, 25 bp, synthetic construct
  misc_feature 1..25: note = Oligonucleotide
  source 1..25: mol_type = other DNA
ctcgtggggtttataatctgttctg

SEQ ID NO: 33850 - DNA, 25 bp, synthetic construct
  misc_feature 1..25: note = Oligonucleotide
  source 1..25: mol_type = other DNA
gcactcgtggggtttataatctgtt

SEQ ID NO: 33851 - DNA, 25 bp, synthetic construct
  misc_feature 1..25: note = Oligonucleotide
  source 1..25: mol_type = other DNA
tctgcactcgtggggtttataatct

SEQ ID NO: 33852 - DNA, 25 bp, synthetic construct
  misc_feature 1..25: note = Oligonucleotide
  source 1..25: mol_type = other DNA
gtctctgcactcgtggggtttataa

SEQ ID NO: 33853 - DNA, 25 bp, synthetic construct
  misc_feature 1..25: note = Oligonucleotide
  source 1..25: mol_type = other DNA
aaagtctctgcactcgtggggttta

SEQ ID NO: 33854 - DNA, 25 bp, synthetic construct
  misc_feature 1..25: note = Oligonucleotide
  source 1..25: mol_type = other DNA
aacaaagtctctgcactcgtggggt

SEQ ID NO: 33855 - DNA, 25 bp, synthetic construct
  misc_feature 1..25: note = Oligonucleotide
  source 1..25: mol_type = other DNA
gagaacaaagtctctgcactcgtgg

SEQ ID NO: 33856 - DNA, 25 bp, synthetic construct
  misc_feature 1..25: note = Oligonucleotide
  source 1..25: mol_type = other DNA
gaagagaacaaagtctctgcactcg

SEQ ID NO: 33857 - DNA, 25 bp, synthetic construct
  misc_feature 1..25: note = Oligonucleotide
  source 1..25: mol_type = other DNA
agagaagagaacaaagtctctgcac

SEQ ID NO: 33858 - DNA, 25 bp, synthetic construct
  misc_feature 1..25: note = Oligonucleotide
  source 1..25: mol_type = other DNA
agcagagaagagaacaaagtctctg

SEQ ID NO: 33859 - DNA, 25 bp, synthetic construct
  misc_feature 1..25: note = Oligonucleotide
  source 1..25: mol_type = other DNA
tacagcagagaagagaacaaagtct

SEQ ID NO: 33860 - DNA, 25 bp, synthetic construct
  misc_feature 1..25: note = Oligonucleotide
  source 1..25: mol_type = other DNA
aaatacagcagagaagagaacaaag

SEQ ID NO: 33861 - DNA, 25 bp, synthetic construct
  misc_feature 1..25: note = Oligonucleotide
  source 1..25: mol_type = other DNA
tgcaaatacagcagagaagagaaca

SEQ ID NO: 33862 - DNA, 25 bp, synthetic construct
  misc_feature 1..25: note = Oligonucleotide
  source 1..25: mol_type = other DNA
ctctgcaaatacagcagagaagaga

SEQ ID NO: 33863 - DNA, 25 bp, synthetic construct
  misc_feature 1..25: note = Oligonucleotide
  source 1..25: mol_type = other DNA
cagctctgcaaatacagcagagaag

SEQ ID NO: 33864 - DNA, 25 bp, synthetic construct
  misc_feature 1..25: note = Oligonucleotide
  source 1..25: mol_type = other DNA
taccagctctgcaaatacagcagag

SEQ ID NO: 33865 - DNA, 25 bp, synthetic construct
  misc_feature 1..25: note = Oligonucleotide
  source 1..25: mol_type = other DNA
gtgtaccagctctgcaaatacagca

SEQ ID NO: 33866 - DNA, 25 bp, synthetic construct
  misc_feature 1..25: note = Oligonucleotide
  source 1..25: mol_type = other DNA
actgtgtaccagctctgcaaataca

SEQ ID NO: 33867 - DNA, 25 bp, synthetic construct
  misc_feature 1..25: note = Oligonucleotide
  source 1..25: mol_type = other DNA
cctactgtgtaccagctctgcaaat

SEQ ID NO: 33868 - DNA, 25 bp, synthetic construct
  misc_feature 1..25: note = Oligonucleotide
  source 1..25: mol_type = other DNA
gctcctactgtgtaccagctctgca

SEQ ID NO: 33869 - DNA, 25 bp, synthetic construct
  misc_feature 1..25: note = Oligonucleotide
  source 1..25: mol_type = other DNA
tgagctcctactgtgtaccagctct

SEQ ID NO: 33870 - DNA, 25 bp, synthetic construct
  misc_feature 1..25: note = Oligonucleotide
  source 1..25: mol_type = other DNA
tattgagctcctactgtgtaccagc

SEQ ID NO: 33871 - DNA, 25 bp, synthetic construct
  misc_feature 1..25: note = Oligonucleotide
  source 1..25: mol_type = other DNA
atttattgagctcctactgtgtacc

SEQ ID NO: 33872 - DNA, 25 bp, synthetic construct
  misc_feature 1..25: note = Oligonucleotide
  source 1..25: mol_type = other DNA
agtatttattgagctcctactgtgt

SEQ ID NO: 33873 - DNA, 25 bp, synthetic construct
  misc_feature 1..25: note = Oligonucleotide
  source 1..25: mol_type = other DNA
gcaagtatttattgagctcctactg

SEQ ID NO: 33874 - DNA, 25 bp, synthetic construct
  misc_feature 1..25: note = Oligonucleotide
  source 1..25: mol_type = other DNA
tcagcaagtatttattgagctccta

SEQ ID NO: 33875 - DNA, 25 bp, synthetic construct
  misc_feature 1..25: note = Oligonucleotide
  source 1..25: mol_type = other DNA
ccttcagcaagtatttattgagctc

SEQ ID NO: 33876 - DNA, 25 bp, synthetic construct
  misc_feature 1..25: note = Oligonucleotide
  source 1..25: mol_type = other DNA
tttccttcagcaagtatttattgag

SEQ ID NO: 33877 - DNA, 25 bp, synthetic construct
  misc_feature 1..25: note = Oligonucleotide
  source 1..25: mol_type = other DNA
tgttttccttcagcaagtatttatt

SEQ ID NO: 33878 - DNA, 25 bp, synthetic construct
  misc_feature 1..25: note = Oligonucleotide
  source 1..25: mol_type = other DNA
ccatgttttccttcagcaagtattt

SEQ ID NO: 33879 - DNA, 25 bp, synthetic construct
  misc_feature 1..25: note = Oligonucleotide
  source 1..25: mol_type = other DNA
gatccatgttttccttcagcaagta

SEQ ID NO: 33880 - DNA, 25 bp, synthetic construct
  misc_feature 1..25: note = Oligonucleotide
  source 1..25: mol_type = other DNA
caagatccatgttttccttcagcaa

SEQ ID NO: 33881 - DNA, 25 bp, synthetic construct
  misc_feature 1..25: note = Oligonucleotide
  source 1..25: mol_type = other DNA
tctcaagatccatgttttccttcag

SEQ ID NO: 33882 - DNA, 25 bp, synthetic construct
  misc_feature 1..25: note = Oligonucleotide
  source 1..25: mol_type = other DNA
atttctcaagatccatgttttcctt

SEQ ID NO: 33883 - DNA, 25 bp, synthetic construct
  misc_feature 1..25: note = Oligonucleotide
  source 1..25: mol_type = other DNA
agcatttctcaagatccatgttttc

SEQ ID NO: 33884 - DNA, 25 bp, synthetic construct
  misc_feature 1..25: note = Oligonucleotide
  source 1..25: mol_type = other DNA
ggtagcatttctcaagatccatgtt

SEQ ID NO: 33885 - DNA, 25 bp, synthetic construct
  misc_feature 1..25: note = Oligonucleotide
  source 1..25: mol_type = other DNA
cttggtagcatttctcaagatccat

SEQ ID NO: 33886 - DNA, 25 bp, synthetic construct
  misc_feature 1..25: note = Oligonucleotide
  source 1..25: mol_type = other DNA
tctcttggtagcatttctcaagatc

SEQ ID NO: 33887 - DNA, 25 bp, synthetic construct
  misc_feature 1..25: note = Oligonucleotide
  source 1..25: mol_type = other DNA
tcctctcttggtagcatttctcaag

SEQ ID NO: 33888 - DNA, 25 bp, synthetic construct
  misc_feature 1..25: note = Oligonucleotide
  source 1..25: mol_type = other DNA
atttcctctcttggtagcatttctc

SEQ ID NO: 33889 - DNA, 25 bp, synthetic construct
  misc_feature 1..25: note = Oligonucleotide
  source 1..25: mol_type = other DNA
ctcatttcctctcttggtagcattt

SEQ ID NO: 33890 - DNA, 25 bp, synthetic construct
  misc_feature 1..25: note = Oligonucleotide
  source 1..25: mol_type = other DNA
ttcctcatttcctctcttggtagca

SEQ ID NO: 33891 - DNA, 25 bp, synthetic construct
  misc_feature 1..25: note = Oligonucleotide
  source 1..25: mol_type = other DNA
accttcctcatttcctctcttggta

SEQ ID NO: 33892 - DNA, 25 bp, synthetic construct
  misc_feature 1..25: note = Oligonucleotide
  source 1..25: mol_type = other DNA
agcaccttcctcatttcctctcttg

SEQ ID NO: 33893 - DNA, 25 bp, synthetic construct
  misc_feature 1..25: note = Oligonucleotide
  source 1..25: mol_type = other DNA
ctcagcaccttcctcatttcctctc

SEQ ID NO: 33894 - DNA, 25 bp, synthetic construct
  misc_feature 1..25: note = Oligonucleotide
  source 1..25: mol_type = other DNA
tccctcagcaccttcctcatttcct

SEQ ID NO: 33895 - DNA, 25 bp, synthetic construct
  misc_feature 1..25: note = Oligonucleotide
  source 1..25: mol_type = other DNA
tcatccctcagcaccttcctcattt

SEQ ID NO: 33896 - DNA, 25 bp, synthetic construct
  misc_feature 1..25: note = Oligonucleotide
  source 1..25: mol_type = other DNA
ctttcatccctcagcaccttcctca

SEQ ID NO: 33897 - DNA, 25 bp, synthetic construct
  misc_feature 1..25: note = Oligonucleotide
  source 1..25: mol_type = other DNA
tcgctttcatccctcagcaccttcc

SEQ ID NO: 33898 - DNA, 25 bp, synthetic construct
  misc_feature 1..25: note = Oligonucleotide
  source 1..25: mol_type = other DNA
gcctcgctttcatccctcagcacct

SEQ ID NO: 33899 - DNA, 25 bp, synthetic construct
  misc_feature 1..25: note = Oligonucleotide
  source 1..25: mol_type = other DNA
actgcctcgctttcatccctcagca

SEQ ID NO: 33900 - DNA, 25 bp, synthetic construct
  misc_feature 1..25: note = Oligonucleotide
  source 1..25: mol_type = other DNA
accactgcctcgctttcatccctca

SEQ ID NO: 33901 - DNA, 25 bp, synthetic construct
  misc_feature 1..25: note = Oligonucleotide
  source 1..25: mol_type = other DNA
accaccactgcctcgctttcatccc

SEQ ID NO: 33902 - DNA, 25 bp, synthetic construct
  misc_feature 1..25: note = Oligonucleotide
  source 1..25: mol_type = other DNA
agcaccaccactgcctcgctttcat

SEQ ID NO: 33903 - DNA, 25 bp, synthetic construct
  misc_feature 1..25: note = Oligonucleotide
  source 1..25: mol_type = other DNA
ggcagcaccaccactgcctcgcttt

SEQ ID NO: 33904 - DNA, 25 bp, synthetic construct
  misc_feature 1..25: note = Oligonucleotide
  source 1..25: mol_type = other DNA
acaggcagcaccaccactgcctcgc

SEQ ID NO: 33905 - DNA, 25 bp, synthetic construct
  misc_feature 1..25: note = Oligonucleotide
  source 1..25: mol_type = other DNA
cccacaggcagcaccaccactgcct

SEQ ID NO: 33906 - DNA, 25 bp, synthetic construct
  misc_feature 1..25: note = Oligonucleotide
  source 1..25: mol_type = other DNA
ggccccacaggcagcaccaccactg

SEQ ID NO: 33907 - DNA, 25 bp, synthetic construct
  misc_feature 1..25: note = Oligonucleotide
  source 1..25: mol_type = other DNA
aaaggccccacaggcagcaccacca

SEQ ID NO: 33908 - DNA, 25 bp, synthetic construct
  misc_feature 1..25: note = Oligonucleotide
  source 1..25: mol_type = other DNA
cgcaaaggccccacaggcagcacca

SEQ ID NO: 33909 - DNA, 25 bp, synthetic construct
  misc_feature 1..25: note = Oligonucleotide
  source 1..25: mol_type = other DNA
gaccgcaaaggccccacaggcagca

SEQ ID NO: 33910 - DNA, 25 bp, synthetic construct
  misc_feature 1..25: note = Oligonucleotide
  source 1..25: mol_type = other DNA
caggaccgcaaaggccccacaggca

SEQ ID NO: 33911 - DNA, 25 bp, synthetic construct
  misc_feature 1..25: note = Oligonucleotide
  source 1..25: mol_type = other DNA
ctccaggaccgcaaaggccccacag

SEQ ID NO: 33912 - DNA, 25 bp, synthetic construct
  misc_feature 1..25: note = Oligonucleotide
  source 1..25: mol_type = other DNA
actctccaggaccgcaaaggcccca

SEQ ID NO: 33913 - DNA, 25 bp, synthetic construct
  misc_feature 1..25: note = Oligonucleotide
  source 1..25: mol_type = other DNA
tccactctccaggaccgcaaaggcc

SEQ ID NO: 33914 - DNA, 25 bp, synthetic construct
  misc_feature 1..25: note = Oligonucleotide
  source 1..25: mol_type = other DNA
agctccactctccaggaccgcaaag

SEQ ID NO: 33915 - DNA, 25 bp, synthetic construct
  misc_feature 1..25: note = Oligonucleotide
  source 1..25: mol_type = other DNA
cgcagctccactctccaggaccgca

SEQ ID NO: 33916 - DNA, 25 bp, synthetic construct
  misc_feature 1..25: note = Oligonucleotide
  source 1..25: mol_type = other DNA
ccccgcagctccactctccaggacc

SEQ ID NO: 33917 - DNA, 25 bp, synthetic construct
  misc_feature 1..25: note = Oligonucleotide
  source 1..25: mol_type = other DNA
cagccccgcagctccactctccagg

SEQ ID NO: 33918 - DNA, 25 bp, synthetic construct
  misc_feature 1..25: note = Oligonucleotide
  source 1..25: mol_type = other DNA
tcccagccccgcagctccactctcc

SEQ ID NO: 33919 - DNA, 25 bp, synthetic construct
  misc_feature 1..25: note = Oligonucleotide
  source 1..25: mol_type = other DNA
ccttcccagccccgcagctccactc

SEQ ID NO: 33920 - DNA, 25 bp, synthetic construct
  misc_feature 1..25: note = Oligonucleotide
  source 1..25: mol_type = other DNA
cagccttcccagccccgcagctcca

SEQ ID NO: 33921 - DNA, 25 bp, synthetic construct
  misc_feature 1..25: note = Oligonucleotide
  source 1..25: mol_type = other DNA
caccagccttcccagccccgcagct

SEQ ID NO: 33922 - DNA, 25 bp, synthetic construct
  misc_feature 1..25: note = Oligonucleotide
  source 1..25: mol_type = other DNA
acccaccagccttcccagccccgca

SEQ ID NO: 33923 - DNA, 25 bp, synthetic construct
  misc_feature 1..25: note = Oligonucleotide
  source 1..25: mol_type = other DNA
cccacccaccagccttcccagcccc

SEQ ID NO: 33924 - DNA, 25 bp, synthetic construct
  misc_feature 1..25: note = Oligonucleotide
  source 1..25: mol_type = other DNA
agccccacccaccagccttcccagc

SEQ ID NO: 33925 - DNA, 25 bp, synthetic construct
  misc_feature 1..25: note = Oligonucleotide
  source 1..25: mol_type = other DNA
gcgagccccacccaccagccttccc

SEQ ID NO: 33926 - DNA, 25 bp, synthetic construct
  misc_feature 1..25: note = Oligonucleotide
  source 1..25: mol_type = other DNA
cctgcgagccccacccaccagcctt

SEQ ID NO: 33927 - DNA, 25 bp, synthetic construct
  misc_feature 1..25: note = Oligonucleotide
  source 1..25: mol_type = other DNA
ctgcctgcgagccccacccaccagc

SEQ ID NO: 33928 - DNA, 25 bp, synthetic construct
  misc_feature 1..25: note = Oligonucleotide
  source 1..25: mol_type = other DNA
cagctgcctgcgagccccacccacc

SEQ ID NO: 33929 - DNA, 25 bp, synthetic construct
  misc_feature 1..25: note = Oligonucleotide
  source 1..25: mol_type = other DNA
ctccagctgcctgcgagccccaccc

SEQ ID NO: 33930 - DNA, 25 bp, synthetic construct
  misc_feature 1..25: note = Oligonucleotide
  source 1..25: mol_type = other DNA
ctcctccagctgcctgcgagcccca

SEQ ID NO: 33931 - DNA, 25 bp, synthetic construct
  misc_feature 1..25: note = Oligonucleotide
  source 1..25: mol_type = other DNA
gagctcctccagctgcctgcgagcc

SEQ ID NO: 33932 - DNA, 25 bp, synthetic construct
  misc_feature 1..25: note = Oligonucleotide
  source 1..25: mol_type = other DNA
cacgagctcctccagctgcctgcga

SEQ ID NO: 33933 - DNA, 25 bp, synthetic construct
  misc_feature 1..25: note = Oligonucleotide
  source 1..25: mol_type = other DNA
tcccacgagctcctccagctgcctg

SEQ ID NO: 33934 - DNA, 25 bp, synthetic construct
  misc_feature 1..25: note = Oligonucleotide
  source 1..25: mol_type = other DNA
tgctcccacgagctcctccagctgc

SEQ ID NO: 33935 - DNA, 25 bp, synthetic construct
  misc_feature 1..25: note = Oligonucleotide
  source 1..25: mol_type = other DNA
ctctgctcccacgagctcctccagc

SEQ ID NO: 33936 - DNA, 25 bp, synthetic construct
  misc_feature 1..25: note = Oligonucleotide
  source 1..25: mol_type = other DNA
cctctctgctcccacgagctcctcc

SEQ ID NO: 33937 - DNA, 25 bp, synthetic construct
  misc_feature 1..25: note = Oligonucleotide
  source 1..25: mol_type = other DNA
tgacctctctgctcccacgagctcc

SEQ ID NO: 33938 - DNA, 25 bp, synthetic construct
  misc_feature 1..25: note = Oligonucleotide
  source 1..25: mol_type = other DNA
ccatgacctctctgctcccacgagc

SEQ ID NO: 33939 - DNA, 25 bp, synthetic construct
  misc_feature 1..25: note = Oligonucleotide
  source 1..25: mol_type = other DNA
cagccatgacctctctgctcccacg

SEQ ID NO: 33940 - DNA, 25 bp, synthetic construct
  misc_feature 1..25: note = Oligonucleotide
  source 1..25: mol_type = other DNA
ctccagccatgacctctctgctccc

SEQ ID NO: 33941 - DNA, 25 bp, synthetic construct
  misc_feature 1..25: note = Oligonucleotide
  source 1..25: mol_type = other DNA
cacctccagccatgacctctctgct

SEQ ID NO: 33942 - DNA, 25 bp, synthetic construct
  misc_feature 1..25: note = Oligonucleotide
  source 1..25: mol_type = other DNA
ccacacctccagccatgacctctct

SEQ ID NO: 33943 - DNA, 25 bp, synthetic construct
  misc_feature 1..25: note = Oligonucleotide
  source 1..25: mol_type = other DNA
gagccacacctccagccatgacctc

SEQ ID NO: 33944 - DNA, 25 bp, synthetic construct
  misc_feature 1..25: note = Oligonucleotide
  source 1..25: mol_type = other DNA
ttcgagccacacctccagccatgac

SEQ ID NO: 33945 - DNA, 25 bp, synthetic construct
  misc_feature 1..25: note = Oligonucleotide
  source 1..25: mol_type = other DNA
aggttcgagccacacctccagccat

SEQ ID NO: 33946 - DNA, 25 bp, synthetic construct
  misc_feature 1..25: note = Oligonucleotide
  source 1..25: mol_type = other DNA
tgaaggttcgagccacacctccagc

SEQ ID NO: 33947 - DNA, 25 bp, synthetic construct
  misc_feature 1..25: note = Oligonucleotide
  source 1..25: mol_type = other DNA
acctgaaggttcgagccacacctcc

SEQ ID NO: 33948 - DNA, 25 bp, synthetic construct
  misc_feature 1..25: note = Oligonucleotide
  source 1..25: mol_type = other DNA
ctgacctgaaggttcgagccacacc

SEQ ID NO: 33949 - DNA, 25 bp, synthetic construct
  misc_feature 1..25: note = Oligonucleotide
  source 1..25: mol_type = other DNA
tcactgacctgaaggttcgagccac

SEQ ID NO: 33950 - DNA, 25 bp, synthetic construct
  misc_feature 1..25: note = Oligonucleotide
  source 1..25: mol_type = other DNA
ccctcactgacctgaaggttcgagc

SEQ ID NO: 33951 - DNA, 25 bp, synthetic construct
  misc_feature 1..25: note = Oligonucleotide
  source 1..25: mol_type = other DNA
ccaccctcactgacctgaaggttcg

SEQ ID NO: 33952 - DNA, 25 bp, synthetic construct
  misc_feature 1..25: note = Oligonucleotide
  source 1..25: mol_type = other DNA
actccaccctcactgacctgaaggt

SEQ ID NO: 33953 - DNA, 25 bp, synthetic construct
  misc_feature 1..25: note = Oligonucleotide
  source 1..25: mol_type = other DNA
accactccaccctcactgacctgaa

SEQ ID NO: 33954 - DNA, 25 bp, synthetic construct
  misc_feature 1..25: note = Oligonucleotide
  source 1..25: mol_type = other DNA
cccaccactccaccctcactgacct

SEQ ID NO: 33955 - DNA, 25 bp, synthetic construct
  misc_feature 1..25: note = Oligonucleotide
  source 1..25: mol_type = other DNA
ctgcccaccactccaccctcactga

SEQ ID NO: 33956 - DNA, 25 bp, synthetic construct
  misc_feature 1..25: note = Oligonucleotide
  source 1..25: mol_type = other DNA
tgtctgcccaccactccaccctcac

SEQ ID NO: 33957 - DNA, 25 bp, synthetic construct
  misc_feature 1..25: note = Oligonucleotide
  source 1..25: mol_type = other DNA
agctgtctgcccaccactccaccct

SEQ ID NO: 33958 - DNA, 25 bp, synthetic construct
  misc_feature 1..25: note = Oligonucleotide
  source 1..25: mol_type = other DNA
gccagctgtctgcccaccactccac

SEQ ID NO: 33959 - DNA, 25 bp, synthetic construct
  misc_feature 1..25: note = Oligonucleotide
  source 1..25: mol_type = other DNA
ctagccagctgtctgcccaccactc

SEQ ID NO: 33960 - DNA, 25 bp, synthetic construct
  misc_feature 1..25: note = Oligonucleotide
  source 1..25: mol_type = other DNA
aagctagccagctgtctgcccacca

SEQ ID NO: 33961 - DNA, 25 bp, synthetic construct
  misc_feature 1..25: note = Oligonucleotide
  source 1..25: mol_type = other DNA
accaagctagccagctgtctgccca

SEQ ID NO: 33962 - DNA, 25 bp, synthetic construct
  misc_feature 1..25: note = Oligonucleotide
  source 1..25: mol_type = other DNA
agcaccaagctagccagctgtctgc

SEQ ID NO: 33963 - DNA, 25 bp, synthetic construct
  misc_feature 1..25: note = Oligonucleotide
  source 1..25: mol_type = other DNA
gccagcaccaagctagccagctgtc

SEQ ID NO: 33964 - DNA, 25 bp, synthetic construct
  misc_feature 1..25: note = Oligonucleotide
  source 1..25: mol_type = other DNA
atggccagcaccaagctagccagct

SEQ ID NO: 33965 - DNA, 25 bp, synthetic construct
  misc_feature 1..25: note = Oligonucleotide
  source 1..25: mol_type = other DNA
cacatggccagcaccaagctagcca

SEQ ID NO: 33966 - DNA, 25 bp, synthetic construct
  misc_feature 1..25: note = Oligonucleotide
  source 1..25: mol_type = other DNA
tcccacatggccagcaccaagctag

SEQ ID NO: 33967 - DNA, 25 bp, synthetic construct
  misc_feature 1..25: note = Oligonucleotide
  source 1..25: mol_type = other DNA
aagtcccacatggccagcaccaagc

SEQ ID NO: 33968 - DNA, 25 bp, synthetic construct
  misc_feature 1..25: note = Oligonucleotide
  source 1..25: mol_type = other DNA
ctcaagtcccacatggccagcacca

SEQ ID NO: 33969 - DNA, 25 bp, synthetic construct
  misc_feature 1..25: note = Oligonucleotide
  source 1..25: mol_type = other DNA
gatctcaagtcccacatggccagca

SEQ ID NO: 33970 - DNA, 25 bp, synthetic construct
  misc_feature 1..25: note = Oligonucleotide
  source 1..25: mol_type = other DNA
cttgatctcaagtcccacatggcca

SEQ ID NO: 33971 - DNA, 25 bp, synthetic construct
  misc_feature 1..25: note = Oligonucleotide
  source 1..25: mol_type = other DNA
cctcttgatctcaagtcccacatgg

SEQ ID NO: 33972 - DNA, 25 bp, synthetic construct
  misc_feature 1..25: note = Oligonucleotide
  source 1..25: mol_type = other DNA
tgtcctcttgatctcaagtcccaca

SEQ ID NO: 33973 - DNA, 25 bp, synthetic construct
  misc_feature 1..25: note = Oligonucleotide
  source 1..25: mol_type = other DNA
aactgtcctcttgatctcaagtccc

SEQ ID NO: 33974 - DNA, 25 bp, synthetic construct
  misc_feature 1..25: note = Oligonucleotide
  source 1..25: mol_type = other DNA
cccaactgtcctcttgatctcaagt

SEQ ID NO: 33975 - DNA, 25 bp, synthetic construct
  misc_feature 1..25: note = Oligonucleotide
  source 1..25: mol_type = other DNA
gtccccaactgtcctcttgatctca

SEQ ID NO: 33976 - DNA, 25 bp, synthetic construct
  misc_feature 1..25: note = Oligonucleotide
  source 1..25: mol_type = other DNA
ttggtccccaactgtcctcttgatc

SEQ ID NO: 33977 - DNA, 25 bp, synthetic construct
  misc_feature 1..25: note = Oligonucleotide
  source 1..25: mol_type = other DNA
agcttggtccccaactgtcctcttg

SEQ ID NO: 33978 - DNA, 25 bp, synthetic construct
  misc_feature 1..25: note = Oligonucleotide
  source 1..25: mol_type = other DNA
cagagcttggtccccaactgtcctc

SEQ ID NO: 33979 - DNA, 25 bp, synthetic construct
  misc_feature 1..25: note = Oligonucleotide
  source 1..25: mol_type = other DNA
ccacagagcttggtccccaactgtc

SEQ ID NO: 33980 - DNA, 25 bp, synthetic construct
  misc_feature 1..25: note = Oligonucleotide
  source 1..25: mol_type = other DNA
atcccacagagcttggtccccaact

SEQ ID NO: 33981 - DNA, 25 bp, synthetic construct
  misc_feature 1..25: note = Oligonucleotide
  source 1..25: mol_type = other DNA
tgcatcccacagagcttggtcccca

SEQ ID NO: 33982 - DNA, 25 bp, synthetic construct
  misc_feature 1..25: note = Oligonucleotide
  source 1..25: mol_type = other DNA
cgatgcatcccacagagcttggtcc

SEQ ID NO: 33983 - DNA, 25 bp, synthetic construct
  misc_feature 1..25: note = Oligonucleotide
  source 1..25: mol_type = other DNA
cctcgatgcatcccacagagcttgg

SEQ ID NO: 33984 - DNA, 25 bp, synthetic construct
  misc_feature 1..25: note = Oligonucleotide
  source 1..25: mol_type = other DNA
tgacctcgatgcatcccacagagct

SEQ ID NO: 33985 - DNA, 25 bp, synthetic construct
  misc_feature 1..25: note = Oligonucleotide
  source 1..25: mol_type = other DNA
ccctgacctcgatgcatcccacaga

SEQ ID NO: 33986 - DNA, 25 bp, synthetic construct
  misc_feature 1..25: note = Oligonucleotide
  source 1..25: mol_type = other DNA
ctgccctgacctcgatgcatcccac

SEQ ID NO: 33987 - DNA, 25 bp, synthetic construct
  misc_feature 1..25: note = Oligonucleotide
  source 1..25: mol_type = other DNA
cccctgccctgacctcgatgcatcc

SEQ ID NO: 33988 - DNA, 25 bp, synthetic construct
  misc_feature 1..25: note = Oligonucleotide
  source 1..25: mol_type = other DNA
ggtcccctgccctgacctcgatgca

SEQ ID NO: 33989 - DNA, 25 bp, synthetic construct
  misc_feature 1..25: note = Oligonucleotide
  source 1..25: mol_type = other DNA
ctgggtcccctgccctgacctcgat

SEQ ID NO: 33990 - DNA, 25 bp, synthetic construct
  misc_feature 1..25: note = Oligonucleotide
  source 1..25: mol_type = other DNA
gggctgggtcccctgccctgacctc

SEQ ID NO: 33991 - DNA, 25 bp, synthetic construct
  misc_feature 1..25: note = Oligonucleotide
  source 1..25: mol_type = other DNA
tgtgggctgggtcccctgccctgac

SEQ ID NO: 33992 - DNA, 25 bp, synthetic construct
  misc_feature 1..25: note = Oligonucleotide
  source 1..25: mol_type = other DNA
gtgtgtgggctgggtcccctgccct

SEQ ID NO: 33993 - DNA, 25 bp, synthetic construct
  misc_feature 1..25: note = Oligonucleotide
  source 1..25: mol_type = other DNA
taggtgtgtgggctgggtcccctgc

SEQ ID NO: 33994 - DNA, 25 bp, synthetic construct
  misc_feature 1..25: note = Oligonucleotide
  source 1..25: mol_type = other DNA
atctaggtgtgtgggctgggtcccc

SEQ ID NO: 33995 - DNA, 25 bp, synthetic construct
  misc_feature 1..25: note = Oligonucleotide
  source 1..25: mol_type = other DNA
gggatctaggtgtgtgggctgggtc

SEQ ID NO: 33996 - DNA, 25 bp, synthetic construct
  misc_feature 1..25: note = Oligonucleotide
  source 1..25: mol_type = other DNA
caggggatctaggtgtgtgggctgg

SEQ ID NO: 33997 - DNA, 25 bp, synthetic construct
  misc_feature 1..25: note = Oligonucleotide
  source 1..25: mol_type = other DNA
gggcaggggatctaggtgtgtgggc

SEQ ID NO: 33998 - DNA, 25 bp, synthetic construct
  misc_feature 1..25: note = Oligonucleotide
  source 1..25: mol_type = other DNA
gtggggcaggggatctaggtgtgtg

SEQ ID NO: 33999 - DNA, 25 bp, synthetic construct
  misc_feature 1..25: note = Oligonucleotide
  source 1..25: mol_type = other DNA
tgagtggggcaggggatctaggtgt

SEQ ID NO: 34000 - DNA, 25 bp, synthetic construct
  misc_feature 1..25: note = Oligonucleotide
  source 1..25: mol_type = other DNA
ctgtgagtggggcaggggatctagg

SEQ ID NO: 34001 - DNA, 25 bp, synthetic construct
  misc_feature 1..25: note = Oligonucleotide
  source 1..25: mol_type = other DNA
taactgtgagtggggcaggggatct

SEQ ID NO: 34002 - DNA, 25 bp, synthetic construct
  misc_feature 1..25: note = Oligonucleotide
  source 1..25: mol_type = other DNA
gactaactgtgagtggggcagggga

SEQ ID NO: 34003 - DNA, 25 bp, synthetic construct
  misc_feature 1..25: note = Oligonucleotide
  source 1..25: mol_type = other DNA
tcagactaactgtgagtggggcagg

SEQ ID NO: 34004 - DNA, 25 bp, synthetic construct
  misc_feature 1..25: note = Oligonucleotide
  source 1..25: mol_type = other DNA
gcttcagactaactgtgagtggggc

SEQ ID NO: 34005 - DNA, 25 bp, synthetic construct
  misc_feature 1..25: note = Oligonucleotide
  source 1..25: mol_type = other DNA
cttgcttcagactaactgtgagtgg

SEQ ID NO: 34006 - DNA, 25 bp, synthetic construct
  misc_feature 1..25: note = Oligonucleotide
  source 1..25: mol_type = other DNA
tcccttgcttcagactaactgtgag

SEQ ID NO: 34007 - DNA, 25 bp, synthetic construct
  misc_feature 1..25: note = Oligonucleotide
  source 1..25: mol_type = other DNA
gggtcccttgcttcagactaactgt

SEQ ID NO: 34008 - DNA, 25 bp, synthetic construct
  misc_feature 1..25: note = Oligonucleotide
  source 1..25: mol_type = other DNA
atggggtcccttgcttcagactaac

SEQ ID NO: 34009 - DNA, 25 bp, synthetic construct
  misc_feature 1..25: note = Oligonucleotide
  source 1..25: mol_type = other DNA
ctcatggggtcccttgcttcagact

SEQ ID NO: 34010 - DNA, 25 bp, synthetic construct
  misc_feature 1..25: note = Oligonucleotide
  source 1..25: mol_type = other DNA
aacctcatggggtcccttgcttcag

SEQ ID NO: 34011 - DNA, 25 bp, synthetic construct
  misc_feature 1..25: note = Oligonucleotide
  source 1..25: mol_type = other DNA
ctcaacctcatggggtcccttgctt

SEQ ID NO: 34012 - DNA, 25 bp, synthetic construct
  misc_feature 1..25: note = Oligonucleotide
  source 1..25: mol_type = other DNA
atgctcaacctcatggggtcccttg

SEQ ID NO: 34013 - DNA, 25 bp, synthetic construct
  misc_feature 1..25: note = Oligonucleotide
  source 1..25: mol_type = other DNA
ttgatgctcaacctcatggggtccc

SEQ ID NO: 34014 - DNA, 25 bp, synthetic construct
  misc_feature 1..25: note = Oligonucleotide
  source 1..25: mol_type = other DNA
tccttgatgctcaacctcatggggt

SEQ ID NO: 34015 - DNA, 25 bp, synthetic construct
  misc_feature 1..25: note = Oligonucleotide
  source 1..25: mol_type = other DNA
agctccttgatgctcaacctcatgg

SEQ ID NO: 34016 - DNA, 25 bp, synthetic construct
  misc_feature 1..25: note = Oligonucleotide
  source 1..25: mol_type = other DNA
aatagctccttgatgctcaacctca

SEQ ID NO: 34017 - DNA, 25 bp, synthetic construct
  misc_feature 1..25: note = Oligonucleotide
  source 1..25: mol_type = other DNA
cacaatagctccttgatgctcaacc

SEQ ID NO: 34018 - DNA, 25 bp, synthetic construct
  misc_feature 1..25: note = Oligonucleotide
  source 1..25: mol_type = other DNA
cttcacaatagctccttgatgctca

SEQ ID NO: 34019 - DNA, 25 bp, synthetic construct
  misc_feature 1..25: note = Oligonucleotide
  source 1..25: mol_type = other DNA
cttcttcacaatagctccttgatgc

SEQ ID NO: 34020 - DNA, 25 bp, synthetic construct
  misc_feature 1..25: note = Oligonucleotide
  source 1..25: mol_type = other DNA
caacttcttcacaatagctccttga

SEQ ID NO: 34021 - DNA, 25 bp, synthetic construct
  misc_feature 1..25: note = Oligonucleotide
  source 1..25: mol_type = other DNA
caccaacttcttcacaatagctcct

SEQ ID NO: 34022 - DNA, 25 bp, synthetic construct
  misc_feature 1..25: note = Oligonucleotide
  source 1..25: mol_type = other DNA
cttcaccaacttcttcacaatagct

SEQ ID NO: 34023 - DNA, 25 bp, synthetic construct
  misc_feature 1..25: note = Oligonucleotide
  source 1..25: mol_type = other DNA
tgtcttcaccaacttcttcacaata

SEQ ID NO: 34024 - DNA, 25 bp, synthetic construct
  misc_feature 1..25: note = Oligonucleotide
  source 1..25: mol_type = other DNA
ttctgtcttcaccaacttcttcaca

SEQ ID NO: 34025 - DNA, 25 bp, synthetic construct
  misc_feature 1..25: note = Oligonucleotide
  source 1..25: mol_type = other DNA
gcgttctgtcttcaccaacttcttc

SEQ ID NO: 34026 - DNA, 25 bp, synthetic construct
  misc_feature 1..25: note = Oligonucleotide
  source 1..25: mol_type = other DNA
gcagcgttctgtcttcaccaacttc

SEQ ID NO: 34027 - DNA, 25 bp, synthetic construct
  misc_feature 1..25: note = Oligonucleotide
  source 1..25: mol_type = other DNA
gaagcagcgttctgtcttcaccaac

SEQ ID NO: 34028 - DNA, 25 bp, synthetic construct
  misc_feature 1..25: note = Oligonucleotide
  source 1..25: mol_type = other DNA
atggaagcagcgttctgtcttcacc

SEQ ID NO: 34029 - DNA, 25 bp, synthetic construct
  misc_feature 1..25: note = Oligonucleotide
  source 1..25: mol_type = other DNA
ggcatggaagcagcgttctgtcttc

SEQ ID NO: 34030 - DNA, 25 bp, synthetic construct
  misc_feature 1..25: note = Oligonucleotide
  source 1..25: mol_type = other DNA
gctggcatggaagcagcgttctgtc

SEQ ID NO: 34031 - DNA, 25 bp, synthetic construct
  misc_feature 1..25: note = Oligonucleotide
  source 1..25: mol_type = other DNA
ggcgctggcatggaagcagcgttct

SEQ ID NO: 34032 - DNA, 25 bp, synthetic construct
  misc_feature 1..25: note = Oligonucleotide
  source 1..25: mol_type = other DNA
ataggcgctggcatggaagcagcgt

SEQ ID NO: 34033 - DNA, 25 bp, synthetic construct
  misc_feature 1..25: note = Oligonucleotide
  source 1..25: mol_type = other DNA
cctataggcgctggcatggaagcag

SEQ ID NO: 34034 - DNA, 25 bp, synthetic construct
  misc_feature 1..25: note = Oligonucleotide
  source 1..25: mol_type = other DNA
gtgcctataggcgctggcatggaag

SEQ ID NO: 34035 - DNA, 25 bp, synthetic construct
  misc_feature 1..25: note = Oligonucleotide
  source 1..25: mol_type = other DNA
tatgtgcctataggcgctggcatgg

SEQ ID NO: 34036 - DNA, 25 bp, synthetic construct
  misc_feature 1..25: note = Oligonucleotide
  source 1..25: mol_type = other DNA
tgctatgtgcctataggcgctggca

SEQ ID NO: 34037 - DNA, 25 bp, synthetic construct
  misc_feature 1..25: note = Oligonucleotide
  source 1..25: mol_type = other DNA
ccgtgctatgtgcctataggcgctg

SEQ ID NO: 34038 - DNA, 25 bp, synthetic construct
  misc_feature 1..25: note = Oligonucleotide
  source 1..25: mol_type = other DNA
atgccgtgctatgtgcctataggcg

SEQ ID NO: 34039 - DNA, 25 bp, synthetic construct
  misc_feature 1..25: note = Oligonucleotide
  source 1..25: mol_type = other DNA
caaatgccgtgctatgtgcctatag

SEQ ID NO: 34040 - DNA, 25 bp, synthetic construct
  misc_feature 1..25: note = Oligonucleotide
  source 1..25: mol_type = other DNA
gtacaaatgccgtgctatgtgccta

SEQ ID NO: 34041 - DNA, 25 bp, synthetic construct
  misc_feature 1..25: note = Oligonucleotide
  source 1..25: mol_type = other DNA
catgtacaaatgccgtgctatgtgc

SEQ ID NO: 34042 - DNA, 25 bp, synthetic construct
  misc_feature 1..25: note = Oligonucleotide
  source 1..25: mol_type = other DNA
actcatgtacaaatgccgtgctatg

SEQ ID NO: 34043 - DNA, 25 bp, synthetic construct
  misc_feature 1..25: note = Oligonucleotide
  source 1..25: mol_type = other DNA
cacactcatgtacaaatgccgtgct

SEQ ID NO: 34044 - DNA, 25 bp, synthetic construct
  misc_feature 1..25: note = Oligonucleotide
  source 1..25: mol_type = other DNA
acccacactcatgtacaaatgccgt

SEQ ID NO: 34045 - DNA, 25 bp, synthetic construct
  misc_feature 1..25: note = Oligonucleotide
  source 1..25: mol_type = other DNA
attacccacactcatgtacaaatgc

SEQ ID NO: 34046 - DNA, 25 bp, synthetic construct
  misc_feature 1..25: note = Oligonucleotide
  source 1..25: mol_type = other DNA
tgcattacccacactcatgtacaaa

SEQ ID NO: 34047 - DNA, 25 bp, synthetic construct
  misc_feature 1..25: note = Oligonucleotide
  source 1..25: mol_type = other DNA
atctgcattacccacactcatgtac

SEQ ID NO: 34048 - DNA, 25 bp, synthetic construct
  misc_feature 1..25: note = Oligonucleotide
  source 1..25: mol_type = other DNA
tgaatctgcattacccacactcatg

SEQ ID NO: 34049 - DNA, 25 bp, synthetic construct
  misc_feature 1..25: note = Oligonucleotide
  source 1..25: mol_type = other DNA
atctgaatctgcattacccacactc

SEQ ID NO: 34050 - DNA, 25 bp, synthetic construct
  misc_feature 1..25: note = Oligonucleotide
  source 1..25: mol_type = other DNA
cacatctgaatctgcattacccaca

SEQ ID NO: 34051 - DNA, 25 bp, synthetic construct
  misc_feature 1..25: note = Oligonucleotide
  source 1..25: mol_type = other DNA
gtgcacatctgaatctgcattaccc

SEQ ID NO: 34052 - DNA, 25 bp, synthetic construct
  misc_feature 1..25: note = Oligonucleotide
  source 1..25: mol_type = other DNA
tgtgtgcacatctgaatctgcatta

SEQ ID NO: 34053 - DNA, 25 bp, synthetic construct
  misc_feature 1..25: note = Oligonucleotide
  source 1..25: mol_type = other DNA
gtgtgtgtgcacatctgaatctgca

SEQ ID NO: 34054 - DNA, 25 bp, synthetic construct
  misc_feature 1..25: note = Oligonucleotide
  source 1..25: mol_type = other DNA
catgtgtgtgtgcacatctgaatct

SEQ ID NO: 34055 - DNA, 25 bp, synthetic construct
  misc_feature 1..25: note = Oligonucleotide
  source 1..25: mol_type = other DNA
atgcatgtgtgtgtgcacatctgaa

SEQ ID NO: 34056 - DNA, 25 bp, synthetic construct
  misc_feature 1..25: note = Oligonucleotide
  source 1..25: mol_type = other DNA
ttcatgcatgtgtgtgtgcacatct

SEQ ID NO: 34057 - DNA, 25 bp, synthetic construct
  misc_feature 1..25: note = Oligonucleotide
  source 1..25: mol_type = other DNA
gtgttcatgcatgtgtgtgtgcaca

SEQ ID NO: 34058 - DNA, 25 bp, synthetic construct
  misc_feature 1..25: note = Oligonucleotide
  source 1..25: mol_type = other DNA
ggtgtgttcatgcatgtgtgtgtgc

SEQ ID NO: 34059 - DNA, 25 bp, synthetic construct
  misc_feature 1..25: note = Oligonucleotide
  source 1..25: mol_type = other DNA
tgaggtgtgttcatgcatgtgtgtg

SEQ ID NO: 34060 - DNA, 25 bp, synthetic construct
  misc_feature 1..25: note = Oligonucleotide
  source 1..25: mol_type = other DNA
gtgtgaggtgtgttcatgcatgtgt

SEQ ID NO: 34061 - DNA, 25 bp, synthetic construct
  misc_feature 1..25: note = Oligonucleotide
  source 1..25: mol_type = other DNA
tgcgtgtgaggtgtgttcatgcatg

SEQ ID NO: 34062 - DNA, 25 bp, synthetic construct
  misc_feature 1..25: note = Oligonucleotide
  source 1..25: mol_type = other DNA
atgtgcgtgtgaggtgtgttcatgc

SEQ ID NO: 34063 - DNA, 25 bp, synthetic construct
  misc_feature 1..25: note = Oligonucleotide
  source 1..25: mol_type = other DNA
gtcatgtgcgtgtgaggtgtgttca

SEQ ID NO: 34064 - DNA, 25 bp, synthetic construct
  misc_feature 1..25: note = Oligonucleotide
  source 1..25: mol_type = other DNA
gccgtcatgtgcgtgtgaggtgtgt

SEQ ID NO: 34065 - DNA, 25 bp, synthetic construct
  misc_feature 1..25: note = Oligonucleotide
  source 1..25: mol_type = other DNA
cctgccgtcatgtgcgtgtgaggtg

SEQ ID NO: 34066 - DNA, 25 bp, synthetic construct
  misc_feature 1..25: note = Oligonucleotide
  source 1..25: mol_type = other DNA
tgacctgccgtcatgtgcgtgtgag

SEQ ID NO: 34067 - DNA, 25 bp, synthetic construct
  misc_feature 1..25: note = Oligonucleotide
  source 1..25: mol_type = other DNA
gtgtgacctgccgtcatgtgcgtgt

SEQ ID NO: 34068 - DNA, 25 bp, synthetic construct
  misc_feature 1..25: note = Oligonucleotide
  source 1..25: mol_type = other DNA
tctgtgtgacctgccgtcatgtgcg

SEQ ID NO: 34069 - DNA, 25 bp, synthetic construct
  misc_feature 1..25: note = Oligonucleotide
  source 1..25: mol_type = other DNA
gtgtctgtgtgacctgccgtcatgt

SEQ ID NO: 34070 - DNA, 25 bp, synthetic construct
  misc_feature 1..25: note = Oligonucleotide
  source 1..25: mol_type = other DNA
catgtgtctgtgtgacctgccgtca

SEQ ID NO: 34071 - DNA, 25 bp, synthetic construct
  misc_feature 1..25: note = Oligonucleotide
  source 1..25: mol_type = other DNA
gctcatgtgtctgtgtgacctgccg

SEQ ID NO: 34072 - DNA, 25 bp, synthetic construct
  misc_feature 1..25: note = Oligonucleotide
  source 1..25: mol_type = other DNA
cgtgctcatgtgtctgtgtgacctg

SEQ ID NO: 34073 - DNA, 25 bp, synthetic construct
  misc_feature 1..25: note = Oligonucleotide
  source 1..25: mol_type = other DNA
tgccgtgctcatgtgtctgtgtgac

SEQ ID NO: 34074 - DNA, 25 bp, synthetic construct
  misc_feature 1..25: note = Oligonucleotide
  source 1..25: mol_type = other DNA
aagtgccgtgctcatgtgtctgtgt

SEQ ID NO: 34075 - DNA, 25 bp, synthetic construct
  misc_feature 1..25: note = Oligonucleotide
  source 1..25: mol_type = other DNA
tgcaagtgccgtgctcatgtgtctg

SEQ ID NO: 34076 - DNA, 25 bp, synthetic construct
  misc_feature 1..25: note = Oligonucleotide
  source 1..25: mol_type = other DNA
gtgtgcaagtgccgtgctcatgtgt

SEQ ID NO: 34077 - DNA, 25 bp, synthetic construct
  misc_feature 1..25: note = Oligonucleotide
  source 1..25: mol_type = other DNA
actgtgtgcaagtgccgtgctcatg

SEQ ID NO: 34078 - DNA, 25 bp, synthetic construct
  misc_feature 1..25: note = Oligonucleotide
  source 1..25: mol_type = other DNA
cccactgtgtgcaagtgccgtgctc

SEQ ID NO: 34079 - DNA, 25 bp, synthetic construct
  misc_feature 1..25: note = Oligonucleotide
  source 1..25: mol_type = other DNA
gagcccactgtgtgcaagtgccgtg

SEQ ID NO: 34080 - DNA, 25 bp, synthetic construct
  misc_feature 1..25: note = Oligonucleotide
  source 1..25: mol_type = other DNA
tatgagcccactgtgtgcaagtgcc

SEQ ID NO: 34081 - DNA, 25 bp, synthetic construct
  misc_feature 1..25: note = Oligonucleotide
  source 1..25: mol_type = other DNA
ctatatgagcccactgtgtgcaagt

SEQ ID NO: 34082 - DNA, 25 bp, synthetic construct
  misc_feature 1..25: note = Oligonucleotide
  source 1..25: mol_type = other DNA
tctctatatgagcccactgtgtgca

SEQ ID NO: 34083 - DNA, 25 bp, synthetic construct
  misc_feature 1..25: note = Oligonucleotide
  source 1..25: mol_type = other DNA
gtgtctctatatgagcccactgtgt

SEQ ID NO: 34084 - DNA, 25 bp, synthetic construct
  misc_feature 1..25: note = Oligonucleotide
  source 1..25: mol_type = other DNA
cacgtgtctctatatgagcccactg

SEQ ID NO: 34085 - DNA, 25 bp, synthetic construct
  misc_feature 1..25: note = Oligonucleotide
  source 1..25: mol_type = other DNA
atgcacgtgtctctatatgagccca

SEQ ID NO: 34086 - DNA, 25 bp, synthetic construct
  misc_feature 1..25: note = Oligonucleotide
  source 1..25: mol_type = other DNA
ctcatgcacgtgtctctatatgagc

SEQ ID NO: 34087 - DNA, 25 bp, synthetic construct
  misc_feature 1..25: note = Oligonucleotide
  source 1..25: mol_type = other DNA
gtgctcatgcacgtgtctctatatg

SEQ ID NO: 34088 - DNA, 25 bp, synthetic construct
  misc_feature 1..25: note = Oligonucleotide
  source 1..25: mol_type = other DNA
gctgtgctcatgcacgtgtctctat

SEQ ID NO: 34089 - DNA, 25 bp, synthetic construct
  misc_feature 1..25: note = Oligonucleotide
  source 1..25: mol_type = other DNA
gatgctgtgctcatgcacgtgtctc

SEQ ID NO: 34090 - DNA, 25 bp, synthetic construct
  misc_feature 1..25: note = Oligonucleotide
  source 1..25: mol_type = other DNA
gtagatgctgtgctcatgcacgtgt

SEQ ID NO: 34091 - DNA, 25 bp, synthetic construct
  misc_feature 1..25: note = Oligonucleotide
  source 1..25: mol_type = other DNA
tgtgtagatgctgtgctcatgcacg

SEQ ID NO: 34092 - DNA, 25 bp, synthetic construct
  misc_feature 1..25: note = Oligonucleotide
  source 1..25: mol_type = other DNA
tcatgtgtagatgctgtgctcatgc

SEQ ID NO: 34093 - DNA, 25 bp, synthetic construct
  misc_feature 1..25: note = Oligonucleotide
  source 1..25: mol_type = other DNA
tggtcatgtgtagatgctgtgctca

SEQ ID NO: 34094 - DNA, 25 bp, synthetic construct
  misc_feature 1..25: note = Oligonucleotide
  source 1..25: mol_type = other DNA
ccgtggtcatgtgtagatgctgtgc

SEQ ID NO: 34095 - DNA, 25 bp, synthetic construct
  misc_feature 1..25: note = Oligonucleotide
  source 1..25: mol_type = other DNA
gatccgtggtcatgtgtagatgctg

SEQ ID NO: 34096 - DNA, 25 bp, synthetic construct
  misc_feature 1..25: note = Oligonucleotide
  source 1..25: mol_type = other DNA
agagatccgtggtcatgtgtagatg

SEQ ID NO: 34097 - DNA, 25 bp, synthetic construct
  misc_feature 1..25: note = Oligonucleotide
  source 1..25: mol_type = other DNA
gtgagagatccgtggtcatgtgtag

SEQ ID NO: 34098 - DNA, 25 bp, synthetic construct
  misc_feature 1..25: note = Oligonucleotide
  source 1..25: mol_type = other DNA
tgtgtgagagatccgtggtcatgtg

SEQ ID NO: 34099 - DNA, 25 bp, synthetic construct
  misc_feature 1..25: note = Oligonucleotide
  source 1..25: mol_type = other DNA
gtgtgtgtgagagatccgtggtcat

SEQ ID NO: 34100 - DNA, 25 bp, synthetic construct
  misc_feature 1..25: note = Oligonucleotide
  source 1..25: mol_type = other DNA
cgtgtgtgtgtgagagatccgtggt

SEQ ID NO: 34101 - DNA, 25 bp, synthetic construct
  misc_feature 1..25: note = Oligonucleotide
  source 1..25: mol_type = other DNA
atacgtgtgtgtgtgagagatccgt

SEQ ID NO: 34102 - DNA, 25 bp, synthetic construct
  misc_feature 1..25: note = Oligonucleotide
  source 1..25: mol_type = other DNA
cacatacgtgtgtgtgtgagagatc

SEQ ID NO: 34103 - DNA, 25 bp, synthetic construct
  misc_feature 1..25: note = Oligonucleotide
  source 1..25: mol_type = other DNA
gtgcacatacgtgtgtgtgtgagag

SEQ ID NO: 34104 - DNA, 25 bp, synthetic construct
  misc_feature 1..25: note = Oligonucleotide
  source 1..25: mol_type = other DNA
ggtgtgcacatacgtgtgtgtgtga

SEQ ID NO: 34105 - DNA, 25 bp, synthetic construct
  misc_feature 1..25: note = Oligonucleotide
  source 1..25: mol_type = other DNA
gggggtgtgcacatacgtgtgtgtg

SEQ ID NO: 34106 - DNA, 25 bp, synthetic construct
  misc_feature 1..25: note = Oligonucleotide
  source 1..25: mol_type = other DNA
gaggggggtgtgcacatacgtgtgt

SEQ ID NO: 34107 - DNA, 25 bp, synthetic construct
  misc_feature 1..25: note = Oligonucleotide
  source 1..25: mol_type = other DNA
aaagaggggggtgtgcacatacgtg

SEQ ID NO: 34108 - DNA, 25 bp, synthetic construct
  misc_feature 1..25: note = Oligonucleotide
  source 1..25: mol_type = other DNA
agcaaagaggggggtgtgcacatac

SEQ ID NO: 34109 - DNA, 25 bp, synthetic construct
  misc_feature 1..25: note = Oligonucleotide
  source 1..25: mol_type = other DNA
gcgagcaaagaggggggtgtgcaca

SEQ ID NO: 34110 - DNA, 25 bp, synthetic construct
  misc_feature 1..25: note = Oligonucleotide
  source 1..25: mol_type = other DNA
gctgcgagcaaagaggggggtgtgc

SEQ ID NO: 34111 - DNA, 25 bp, synthetic construct
  misc_feature 1..25: note = Oligonucleotide
  source 1..25: mol_type = other DNA
aaggctgcgagcaaagaggggggtg

SEQ ID NO: 34112 - DNA, 25 bp, synthetic construct
  misc_feature 1..25: note = Oligonucleotide
  source 1..25: mol_type = other DNA
cccaaggctgcgagcaaagaggggg

SEQ ID NO: 34113 - DNA, 25 bp, synthetic construct
  misc_feature 1..25: note = Oligonucleotide
  source 1..25: mol_type = other DNA
agccccaaggctgcgagcaaagagg

SEQ ID NO: 34114 - DNA, 25 bp, synthetic construct
  misc_feature 1..25: note = Oligonucleotide
  source 1..25: mol_type = other DNA
gtgagccccaaggctgcgagcaaag

SEQ ID NO: 34115 - DNA, 25 bp, synthetic construct
  misc_feature 1..25: note = Oligonucleotide
  source 1..25: mol_type = other DNA
taagtgagccccaaggctgcgagca

SEQ ID NO: 34116 - DNA, 25 bp, synthetic construct
  misc_feature 1..25: note = Oligonucleotide
  source 1..25: mol_type = other DNA
gcgtaagtgagccccaaggctgcga

SEQ ID NO: 34117 - DNA, 25 bp, synthetic construct
  misc_feature 1..25: note = Oligonucleotide
  source 1..25: mol_type = other DNA
agagcgtaagtgagccccaaggctg

SEQ ID NO: 34118 - DNA, 25 bp, synthetic construct
  misc_feature 1..25: note = Oligonucleotide
  source 1..25: mol_type = other DNA
cacagagcgtaagtgagccccaagg

SEQ ID NO: 34119 - DNA, 25 bp, synthetic construct
  misc_feature 1..25: note = Oligonucleotide
  source 1..25: mol_type = other DNA
gtccacagagcgtaagtgagcccca

SEQ ID NO: 34120 - DNA, 25 bp, synthetic construct
  misc_feature 1..25: note = Oligonucleotide
  source 1..25: mol_type = other DNA
gccgtccacagagcgtaagtgagcc

SEQ ID NO: 34121 - DNA, 25 bp, synthetic construct
  misc_feature 1..25: note = Oligonucleotide
  source 1..25: mol_type = other DNA
agagccgtccacagagcgtaagtga

SEQ ID NO: 34122 - DNA, 25 bp, synthetic construct
  misc_feature 1..25: note = Oligonucleotide
  source 1..25: mol_type = other DNA
gccagagccgtccacagagcgtaag

SEQ ID NO: 34123 - DNA, 25 bp, synthetic construct
  misc_feature 1..25: note = Oligonucleotide
  source 1..25: mol_type = other DNA
aaggccagagccgtccacagagcgt

SEQ ID NO: 34124 - DNA, 25 bp, synthetic construct
  misc_feature 1..25: note = Oligonucleotide
  source 1..25: mol_type = other DNA
aacaaggccagagccgtccacagag

SEQ ID NO: 34125 - DNA, 25 bp, synthetic construct
  misc_feature 1..25: note = Oligonucleotide
  source 1..25: mol_type = other DNA
ccaaacaaggccagagccgtccaca

SEQ ID NO: 34126 - DNA, 25 bp, synthetic construct
  misc_feature 1..25: note = Oligonucleotide
  source 1..25: mol_type = other DNA
agtccaaacaaggccagagccgtcc

SEQ ID NO: 34127 - DNA, 25 bp, synthetic construct
  misc_feature 1..25: note = Oligonucleotide
  source 1..25: mol_type = other DNA
aggagtccaaacaaggccagagccg

SEQ ID NO: 34128 - DNA, 25 bp, synthetic construct
  misc_feature 1..25: note = Oligonucleotide
  source 1..25: mol_type = other DNA
accaggagtccaaacaaggccagag

SEQ ID NO: 34129 - DNA, 25 bp, synthetic construct
  misc_feature 1..25: note = Oligonucleotide
  source 1..25: mol_type = other DNA
tgaaccaggagtccaaacaaggcca

SEQ ID NO: 34130 - DNA, 25 bp, synthetic construct
  misc_feature 1..25: note = Oligonucleotide
  source 1..25: mol_type = other DNA
tgctgaaccaggagtccaaacaagg

SEQ ID NO: 34131 - DNA, 25 bp, synthetic construct
  misc_feature 1..25: note = Oligonucleotide
  source 1..25: mol_type = other DNA
agctgctgaaccaggagtccaaaca

SEQ ID NO: 34132 - DNA, 25 bp, synthetic construct
  misc_feature 1..25: note = Oligonucleotide
  source 1..25: mol_type = other DNA
agtagctgctgaaccaggagtccaa

SEQ ID NO: 34133 - DNA, 25 bp, synthetic construct
  misc_feature 1..25: note = Oligonucleotide
  source 1..25: mol_type = other DNA
ctaagtagctgctgaaccaggagtc

SEQ ID NO: 34134 - DNA, 25 bp, synthetic construct
  misc_feature 1..25: note = Oligonucleotide
  source 1..25: mol_type = other DNA
ttcctaagtagctgctgaaccagga

SEQ ID NO: 34135 - DNA, 25 bp, synthetic construct
  misc_feature 1..25: note = Oligonucleotide
  source 1..25: mol_type = other DNA
tctttcctaagtagctgctgaacca

SEQ ID NO: 34136 - DNA, 25 bp, synthetic construct
  misc_feature 1..25: note = Oligonucleotide
  source 1..25: mol_type = other DNA
atctctttcctaagtagctgctgaa

SEQ ID NO: 34137 - DNA, 25 bp, synthetic construct
  misc_feature 1..25: note = Oligonucleotide
  source 1..25: mol_type = other DNA
ctcatctctttcctaagtagctgct

SEQ ID NO: 34138 - DNA, 25 bp, synthetic construct
  misc_feature 1..25: note = Oligonucleotide
  source 1..25: mol_type = other DNA
cagctcatctctttcctaagtagct

SEQ ID NO: 34139 - DNA, 25 bp, synthetic construct
  misc_feature 1..25: note = Oligonucleotide
  source 1..25: mol_type = other DNA
cagcagctcatctctttcctaagta

SEQ ID NO: 34140 - DNA, 25 bp, synthetic construct
  misc_feature 1..25: note = Oligonucleotide
  source 1..25: mol_type = other DNA
gggcagcagctcatctctttcctaa

SEQ ID NO: 34141 - DNA, 25 bp, synthetic construct
  misc_feature 1..25: note = Oligonucleotide
  source 1..25: mol_type = other DNA
agggggcagcagctcatctctttcc

SEQ ID NO: 34142 - DNA, 25 bp, synthetic construct
  misc_feature 1..25: note = Oligonucleotide
  source 1..25: mol_type = other DNA
aagagggggcagcagctcatctctt

SEQ ID NO: 34143 - DNA, 25 bp, synthetic construct
  misc_feature 1..25: note = Oligonucleotide
  source 1..25: mol_type = other DNA
cccaagagggggcagcagctcatct

SEQ ID NO: 34144 - DNA, 25 bp, synthetic construct
  misc_feature 1..25: note = Oligonucleotide
  source 1..25: mol_type = other DNA
gggcccaagagggggcagcagctca

SEQ ID NO: 34145 - DNA, 25 bp, synthetic construct
  misc_feature 1..25: note = Oligonucleotide
  source 1..25: mol_type = other DNA
tcagggcccaagagggggcagcagc

SEQ ID NO: 34146 - DNA, 25 bp, synthetic construct
  misc_feature 1..25: note = Oligonucleotide
  source 1..25: mol_type = other DNA
gggtcagggcccaagagggggcagc

SEQ ID NO: 34147 - DNA, 25 bp, synthetic construct
  misc_feature 1..25: note = Oligonucleotide
  source 1..25: mol_type = other DNA
cgtgggtcagggcccaagagggggc

SEQ ID NO: 34148 - DNA, 25 bp, synthetic construct
  misc_feature 1..25: note = Oligonucleotide
  source 1..25: mol_type = other DNA
ctccgtgggtcagggcccaagaggg

SEQ ID NO: 34149 - DNA, 25 bp, synthetic construct
  misc_feature 1..25: note = Oligonucleotide
  source 1..25: mol_type = other DNA
gacctccgtgggtcagggcccaaga

SEQ ID NO: 34150 - DNA, 25 bp, synthetic construct
  misc_feature 1..25: note = Oligonucleotide
  source 1..25: mol_type = other DNA
tctgacctccgtgggtcagggccca

SEQ ID NO: 34151 - DNA, 25 bp, synthetic construct
  misc_feature 1..25: note = Oligonucleotide
  source 1..25: mol_type = other DNA
aattctgacctccgtgggtcagggc

SEQ ID NO: 34152 - DNA, 25 bp, synthetic construct
  misc_feature 1..25: note = Oligonucleotide
  source 1..25: mol_type = other DNA
gggaattctgacctccgtgggtcag

SEQ ID NO: 34153 - DNA, 25 bp, synthetic construct
  misc_feature 1..25: note = Oligonucleotide
  source 1..25: mol_type = other DNA
gtagggaattctgacctccgtgggt

SEQ ID NO: 34154 - DNA, 25 bp, synthetic construct
  misc_feature 1..25: note = Oligonucleotide
  source 1..25: mol_type = other DNA
gatgtagggaattctgacctccgtg

SEQ ID NO: 34155 - DNA, 25 bp, synthetic construct
  misc_feature 1..25: note = Oligonucleotide
  source 1..25: mol_type = other DNA
gatgatgtagggaattctgacctcc

SEQ ID NO: 34156 - DNA, 25 bp, synthetic construct
  misc_feature 1..25: note = Oligonucleotide
  source 1..25: mol_type = other DNA
ggggatgatgtagggaattctgacc

SEQ ID NO: 34157 - DNA, 25 bp, synthetic construct
  misc_feature 1..25: note = Oligonucleotide
  source 1..25: mol_type = other DNA
tgaggggatgatgtagggaattctg

SEQ ID NO: 34158 - DNA, 25 bp, synthetic construct
  misc_feature 1..25: note = Oligonucleotide
  source 1..25: mol_type = other DNA
ggctgaggggatgatgtagggaatt

SEQ ID NO: 34159 - DNA, 25 bp, synthetic construct
  misc_feature 1..25: note = Oligonucleotide
  source 1..25: mol_type = other DNA
gaaggctgaggggatgatgtaggga

SEQ ID NO: 34160 - DNA, 25 bp, synthetic construct
  misc_feature 1..25: note = Oligonucleotide
  source 1..25: mol_type = other DNA
taagaaggctgaggggatgatgtag

SEQ ID NO: 34161 - DNA, 25 bp, synthetic construct
  misc_feature 1..25: note = Oligonucleotide
  source 1..25: mol_type = other DNA
aggtaagaaggctgaggggatgatg

SEQ ID NO: 34162 - DNA, 25 bp, synthetic construct
  misc_feature 1..25: note = Oligonucleotide
  source 1..25: mol_type = other DNA
cagaggtaagaaggctgaggggatg

SEQ ID NO: 34163 - DNA, 25 bp, synthetic construct
  misc_feature 1..25: note = Oligonucleotide
  source 1..25: mol_type = other DNA
gtccagaggtaagaaggctgagggg

SEQ ID NO: 34164 - DNA, 25 bp, synthetic construct
  misc_feature 1..25: note = Oligonucleotide
  source 1..25: mol_type = other DNA
tgggtccagaggtaagaaggctgag

SEQ ID NO: 34165 - DNA, 25 bp, synthetic construct
  misc_feature 1..25: note = Oligonucleotide
  source 1..25: mol_type = other DNA
tcctgggtccagaggtaagaaggct

SEQ ID NO: 34166 - DNA, 25 bp, synthetic construct
  misc_feature 1..25: note = Oligonucleotide
  source 1..25: mol_type = other DNA
gagtcctgggtccagaggtaagaag

SEQ ID NO: 34167 - DNA, 25 bp, synthetic construct
  misc_feature 1..25: note = Oligonucleotide
  source 1..25: mol_type = other DNA
ctggagtcctgggtccagaggtaag

SEQ ID NO: 34168 - DNA, 25 bp, synthetic construct
  misc_feature 1..25: note = Oligonucleotide
  source 1..25: mol_type = other DNA
atcctggagtcctgggtccagaggt

SEQ ID NO: 34169 - DNA, 25 bp, synthetic construct
  misc_feature 1..25: note = Oligonucleotide
  source 1..25: mol_type = other DNA
caaatcctggagtcctgggtccaga

SEQ ID NO: 34170 - DNA, 25 bp, synthetic construct
  misc_feature 1..25: note = Oligonucleotide
  source 1..25: mol_type = other DNA
ccccaaatcctggagtcctgggtcc

SEQ ID NO: 34171 - DNA, 25 bp, synthetic construct
  misc_feature 1..25: note = Oligonucleotide
  source 1..25: mol_type = other DNA
gggccccaaatcctggagtcctggg

SEQ ID NO: 34172 - DNA, 25 bp, synthetic construct
  misc_feature 1..25: note = Oligonucleotide
  source 1..25: mol_type = other DNA
agggggccccaaatcctggagtcct

SEQ ID NO: 34173 - DNA, 25 bp, synthetic construct
  misc_feature 1..25: note = Oligonucleotide
  source 1..25: mol_type = other DNA
agtagggggccccaaatcctggagt

SEQ ID NO: 34174 - DNA, 25 bp, synthetic construct
  misc_feature 1..25: note = Oligonucleotide
  source 1..25: mol_type = other DNA
ggaagtagggggccccaaatcctgg

SEQ ID NO: 34175 - DNA, 25 bp, synthetic construct
  misc_feature 1..25: note = Oligonucleotide
  source 1..25: mol_type = other DNA
gatggaagtagggggccccaaatcc

SEQ ID NO: 34176 - DNA, 25 bp, synthetic construct
  misc_feature 1..25: note = Oligonucleotide
  source 1..25: mol_type = other DNA
ccagatggaagtagggggccccaaa

SEQ ID NO: 34177 - DNA, 25 bp, synthetic construct
  misc_feature 1..25: note = Oligonucleotide
  source 1..25: mol_type = other DNA
tgtccagatggaagtagggggcccc

SEQ ID NO: 34178 - DNA, 25 bp, synthetic construct
  misc_feature 1..25: note = Oligonucleotide
  source 1..25: mol_type = other DNA
ttgtgtccagatggaagtagggggc

SEQ ID NO: 34179 - DNA, 25 bp, synthetic construct
  misc_feature 1..25: note = Oligonucleotide
  source 1..25: mol_type = other DNA
tggttgtgtccagatggaagtaggg

SEQ ID NO: 34180 - DNA, 25 bp, synthetic construct
  misc_feature 1..25: note = Oligonucleotide
  source 1..25: mol_type = other DNA
gcctggttgtgtccagatggaagta

SEQ ID NO: 34181 - DNA, 25 bp, synthetic construct
  misc_feature 1..25: note = Oligonucleotide
  source 1..25: mol_type = other DNA
ttggcctggttgtgtccagatggaa

SEQ ID NO: 34182 - DNA, 25 bp, synthetic construct
  misc_feature 1..25: note = Oligonucleotide
  source 1..25: mol_type = other DNA
cccttggcctggttgtgtccagatg

SEQ ID NO: 34183 - DNA, 25 bp, synthetic construct
  misc_feature 1..25: note = Oligonucleotide
  source 1..25: mol_type = other DNA
acccccttggcctggttgtgtccag

SEQ ID NO: 34184 - DNA, 25 bp, synthetic construct
  misc_feature 1..25: note = Oligonucleotide
  source 1..25: mol_type = other DNA
cacacccccttggcctggttgtgtc

SEQ ID NO: 34185 - DNA, 25 bp, synthetic construct
  misc_feature 1..25: note = Oligonucleotide
  source 1..25: mol_type = other DNA
acacacacccccttggcctggttgt

SEQ ID NO: 34186 - DNA, 25 bp, synthetic construct
  misc_feature 1..25: note = Oligonucleotide
  source 1..25: mol_type = other DNA
cccacacacacccccttggcctggt

SEQ ID NO: 34187 - DNA, 25 bp, synthetic construct
  misc_feature 1..25: note = Oligonucleotide
  source 1..25: mol_type = other DNA
ctgcccacacacacccccttggcct

SEQ ID NO: 34188 - DNA, 25 bp, synthetic construct
  misc_feature 1..25: note = Oligonucleotide
  source 1..25: mol_type = other DNA
tctctgcccacacacacccccttgg

SEQ ID NO: 34189 - DNA, 25 bp, synthetic construct
  misc_feature 1..25: note = Oligonucleotide
  source 1..25: mol_type = other DNA
cagtctctgcccacacacaccccct

SEQ ID NO: 34190 - DNA, 25 bp, synthetic construct
  misc_feature 1..25: note = Oligonucleotide
  source 1..25: mol_type = other DNA
caccagtctctgcccacacacaccc

SEQ ID NO: 34191 - DNA, 25 bp, synthetic construct
  misc_feature 1..25: note = Oligonucleotide
  source 1..25: mol_type = other DNA
ggtcaccagtctctgcccacacaca

SEQ ID NO: 34192 - DNA, 25 bp, synthetic construct
  misc_feature 1..25: note = Oligonucleotide
  source 1..25: mol_type = other DNA
gctggtcaccagtctctgcccacac

SEQ ID NO: 34193 - DNA, 25 bp, synthetic construct
  misc_feature 1..25: note = Oligonucleotide
  source 1..25: mol_type = other DNA
catgctggtcaccagtctctgccca

SEQ ID NO: 34194 - DNA, 25 bp, synthetic construct
  misc_feature 1..25: note = Oligonucleotide
  source 1..25: mol_type = other DNA
acccatgctggtcaccagtctctgc

SEQ ID NO: 34195 - DNA, 25 bp, synthetic construct
  misc_feature 1..25: note = Oligonucleotide
  source 1..25: mol_type = other DNA
ctcacccatgctggtcaccagtctc

SEQ ID NO: 34196 - DNA, 25 bp, synthetic construct
  misc_feature 1..25: note = Oligonucleotide
  source 1..25: mol_type = other DNA
gccctcacccatgctggtcaccagt

SEQ ID NO: 34197 - DNA, 25 bp, synthetic construct
  misc_feature 1..25: note = Oligonucleotide
  source 1..25: mol_type = other DNA
actgccctcacccatgctggtcacc

SEQ ID NO: 34198 - DNA, 25 bp, synthetic construct
  misc_feature 1..25: note = Oligonucleotide
  source 1..25: mol_type = other DNA
tcaactgccctcacccatgctggtc

SEQ ID NO: 34199 - DNA, 25 bp, synthetic construct
  misc_feature 1..25: note = Oligonucleotide
  source 1..25: mol_type = other DNA
gcctcaactgccctcacccatgctg

SEQ ID NO: 34200 - DNA, 25 bp, synthetic construct
  misc_feature 1..25: note = Oligonucleotide
  source 1..25: mol_type = other DNA
cctgcctcaactgccctcacccatg

SEQ ID NO: 34201 - DNA, 25 bp, synthetic construct
  misc_feature 1..25: note = Oligonucleotide
  source 1..25: mol_type = other DNA
tggcctgcctcaactgccctcaccc

SEQ ID NO: 34202 - DNA, 25 bp, synthetic construct
  misc_feature 1..25: note = Oligonucleotide
  source 1..25: mol_type = other DNA
agctggcctgcctcaactgccctca

SEQ ID NO: 34203 - DNA, 25 bp, synthetic construct
  misc_feature 1..25: note = Oligonucleotide
  source 1..25: mol_type = other DNA
tccagctggcctgcctcaactgccc

SEQ ID NO: 34204 - DNA, 25 bp, synthetic construct
  misc_feature 1..25: note = Oligonucleotide
  source 1..25: mol_type = other DNA
gcctccagctggcctgcctcaactg

SEQ ID NO: 34205 - DNA, 25 bp, synthetic construct
  misc_feature 1..25: note = Oligonucleotide
  source 1..25: mol_type = other DNA
gtggcctccagctggcctgcctcaa

SEQ ID NO: 34206 - DNA, 25 bp, synthetic construct
  misc_feature 1..25: note = Oligonucleotide
  source 1..25: mol_type = other DNA
gtcgtggcctccagctggcctgcct

SEQ ID NO: 34207 - DNA, 25 bp, synthetic construct
  misc_feature 1..25: note = Oligonucleotide
  source 1..25: mol_type = other DNA
acagtcgtggcctccagctggcctg

SEQ ID NO: 34208 - DNA, 25 bp, synthetic construct
  misc_feature 1..25: note = Oligonucleotide
  source 1..25: mol_type = other DNA
tggacagtcgtggcctccagctggc

SEQ ID NO: 34209 - DNA, 25 bp, synthetic construct
  misc_feature 1..25: note = Oligonucleotide
  source 1..25: mol_type = other DNA
tgatggacagtcgtggcctccagct

SEQ ID NO: 34210 - DNA, 25 bp, synthetic construct
  misc_feature 1..25: note = Oligonucleotide
  source 1..25: mol_type = other DNA
agctgatggacagtcgtggcctcca

SEQ ID NO: 34211 - DNA, 25 bp, synthetic construct
  misc_feature 1..25: note = Oligonucleotide
  source 1..25: mol_type = other DNA
gggagctgatggacagtcgtggcct

SEQ ID NO: 34212 - DNA, 25 bp, synthetic construct
  misc_feature 1..25: note = Oligonucleotide
  source 1..25: mol_type = other DNA
atcgggagctgatggacagtcgtgg

SEQ ID NO: 34213 - DNA, 25 bp, synthetic construct
  misc_feature 1..25: note = Oligonucleotide
  source 1..25: mol_type = other DNA
agtatcgggagctgatggacagtcg

SEQ ID NO: 34214 - DNA, 25 bp, synthetic construct
  misc_feature 1..25: note = Oligonucleotide
  source 1..25: mol_type = other DNA
gggagtatcgggagctgatggacag

SEQ ID NO: 34215 - DNA, 25 bp, synthetic construct
  misc_feature 1..25: note = Oligonucleotide
  source 1..25: mol_type = other DNA
gaagggagtatcgggagctgatgga

SEQ ID NO: 34216 - DNA, 25 bp, synthetic construct
  misc_feature 1..25: note = Oligonucleotide
  source 1..25: mol_type = other DNA
tctgaagggagtatcgggagctgat

SEQ ID NO: 34217 - DNA, 25 bp, synthetic construct
  misc_feature 1..25: note = Oligonucleotide
  source 1..25: mol_type = other DNA
gtttctgaagggagtatcgggagct

SEQ ID NO: 34218 - DNA, 25 bp, synthetic construct
  misc_feature 1..25: note = Oligonucleotide
  source 1..25: mol_type = other DNA
cgcgtttctgaagggagtatcggga

SEQ ID NO: 34219 - DNA, 25 bp, synthetic construct
  misc_feature 1..25: note = Oligonucleotide
  source 1..25: mol_type = other DNA
tcccgcgtttctgaagggagtatcg

SEQ ID NO: 34220 - DNA, 25 bp, synthetic construct
  misc_feature 1..25: note = Oligonucleotide
  source 1..25: mol_type = other DNA
tcctcccgcgtttctgaagggagta

SEQ ID NO: 34221 - DNA, 25 bp, synthetic construct
  misc_feature 1..25: note = Oligonucleotide
  source 1..25: mol_type = other DNA
cggtcctcccgcgtttctgaaggga

SEQ ID NO: 34222 - DNA, 25 bp, synthetic construct
  misc_feature 1..25: note = Oligonucleotide
  source 1..25: mol_type = other DNA
gtccggtcctcccgcgtttctgaag

SEQ ID NO: 34223 - DNA, 25 bp, synthetic construct
  misc_feature 1..25: note = Oligonucleotide
  source 1..25: mol_type = other DNA
ttcgtccggtcctcccgcgtttctg

SEQ ID NO: 34224 - DNA, 25 bp, synthetic construct
  misc_feature 1..25: note = Oligonucleotide
  source 1..25: mol_type = other DNA
cgcttcgtccggtcctcccgcgttt

SEQ ID NO: 34225 - DNA, 25 bp, synthetic construct
  misc_feature 1..25: note = Oligonucleotide
  source 1..25: mol_type = other DNA
agccgcttcgtccggtcctcccgcg

SEQ ID NO: 34226 - DNA, 25 bp, synthetic construct
  misc_feature 1..25: note = Oligonucleotide
  source 1..25: mol_type = other DNA
aagagccgcttcgtccggtcctccc

SEQ ID NO: 34227 - DNA, 25 bp, synthetic construct
  misc_feature 1..25: note = Oligonucleotide
  source 1..25: mol_type = other DNA
cgaaagagccgcttcgtccggtcct

SEQ ID NO: 34228 - DNA, 25 bp, synthetic construct
  misc_feature 1..25: note = Oligonucleotide
  source 1..25: mol_type = other DNA
tgccgaaagagccgcttcgtccggt

SEQ ID NO: 34229 - DNA, 25 bp, synthetic construct
  misc_feature 1..25: note = Oligonucleotide
  source 1..25: mol_type = other DNA
tagtgccgaaagagccgcttcgtcc

SEQ ID NO: 34230 - DNA, 25 bp, synthetic construct
  misc_feature 1..25: note = Oligonucleotide
  source 1..25: mol_type = other DNA
gtgtagtgccgaaagagccgcttcg

SEQ ID NO: 34231 - DNA, 25 bp, synthetic construct
  misc_feature 1..25: note = Oligonucleotide
  source 1..25: mol_type = other DNA
actgtgtagtgccgaaagagccgct

SEQ ID NO: 34232 - DNA, 25 bp, synthetic construct
  misc_feature 1..25: note = Oligonucleotide
  source 1..25: mol_type = other DNA
cccactgtgtagtgccgaaagagcc

SEQ ID NO: 34233 - DNA, 25 bp, synthetic construct
  misc_feature 1..25: note = Oligonucleotide
  source 1..25: mol_type = other DNA
gagcccactgtgtagtgccgaaaga

SEQ ID NO: 34234 - DNA, 25 bp, synthetic construct
  misc_feature 1..25: note = Oligonucleotide
  source 1..25: mol_type = other DNA
taggagcccactgtgtagtgccgaa

SEQ ID NO: 34235 - DNA, 25 bp, synthetic construct
  misc_feature 1..25: note = Oligonucleotide
  source 1..25: mol_type = other DNA
tcgtaggagcccactgtgtagtgcc

SEQ ID NO: 34236 - DNA, 25 bp, synthetic construct
  misc_feature 1..25: note = Oligonucleotide
  source 1..25: mol_type = other DNA
ctgtcgtaggagcccactgtgtagt

SEQ ID NO: 34237 - DNA, 25 bp, synthetic construct
  misc_feature 1..25: note = Oligonucleotide
  source 1..25: mol_type = other DNA
aggctgtcgtaggagcccactgtgt

SEQ ID NO: 34238 - DNA, 25 bp, synthetic construct
  misc_feature 1..25: note = Oligonucleotide
  source 1..25: mol_type = other DNA
gtgaggctgtcgtaggagcccactg

SEQ ID NO: 34239 - DNA, 25 bp, synthetic construct
  misc_feature 1..25: note = Oligonucleotide
  source 1..25: mol_type = other DNA
gaggtgaggctgtcgtaggagccca

SEQ ID NO: 34240 - DNA, 25 bp, synthetic construct
  misc_feature 1..25: note = Oligonucleotide
  source 1..25: mol_type = other DNA
tgtgaggtgaggctgtcgtaggagc

SEQ ID NO: 34241 - DNA, 25 bp, synthetic construct
  misc_feature 1..25: note = Oligonucleotide
  source 1..25: mol_type = other DNA
ctgtgtgaggtgaggctgtcgtagg

SEQ ID NO: 34242 - DNA, 25 bp, synthetic construct
  misc_feature 1..25: note = Oligonucleotide
  source 1..25: mol_type = other DNA
tacctgtgtgaggtgaggctgtcgt

SEQ ID NO: 34243 - DNA, 25 bp, synthetic construct
  misc_feature 1..25: note = Oligonucleotide
  source 1..25: mol_type = other DNA
acgtacctgtgtgaggtgaggctgt

SEQ ID NO: 34244 - DNA, 25 bp, synthetic construct
  misc_feature 1..25: note = Oligonucleotide
  source 1..25: mol_type = other DNA
tgcacgtacctgtgtgaggtgaggc

SEQ ID NO: 34245 - DNA, 25 bp, synthetic construct
  misc_feature 1..25: note = Oligonucleotide
  source 1..25: mol_type = other DNA
ccctgcacgtacctgtgtgaggtga

SEQ ID NO: 34246 - DNA, 25 bp, synthetic construct
  misc_feature 1..25: note = Oligonucleotide
  source 1..25: mol_type = other DNA
ggtccctgcacgtacctgtgtgagg

SEQ ID NO: 34247 - DNA, 25 bp, synthetic construct
  misc_feature 1..25: note = Oligonucleotide
  source 1..25: mol_type = other DNA
cagggtccctgcacgtacctgtgtg

SEQ ID NO: 34248 - DNA, 25 bp, synthetic construct
  misc_feature 1..25: note = Oligonucleotide
  source 1..25: mol_type = other DNA
agccagggtccctgcacgtacctgt

SEQ ID NO: 34249 - DNA, 25 bp, synthetic construct
  misc_feature 1..25: note = Oligonucleotide
  source 1..25: mol_type = other DNA
gccagccagggtccctgcacgtacc

SEQ ID NO: 34250 - DNA, 25 bp, synthetic construct
  misc_feature 1..25: note = Oligonucleotide
  source 1..25: mol_type = other DNA
cccgccagccagggtccctgcacgt

SEQ ID NO: 34251 - DNA, 25 bp, synthetic construct
  misc_feature 1..25: note = Oligonucleotide
  source 1..25: mol_type = other DNA
gctcccgccagccagggtccctgca

SEQ ID NO: 34252 - DNA, 25 bp, synthetic construct
  misc_feature 1..25: note = Oligonucleotide
  source 1..25: mol_type = other DNA
catgctcccgccagccagggtccct

SEQ ID NO: 34253 - DNA, 25 bp, synthetic construct
  misc_feature 1..25: note = Oligonucleotide
  source 1..25: mol_type = other DNA
atgcatgctcccgccagccagggtc

SEQ ID NO: 34254 - DNA, 25 bp, synthetic construct
  misc_feature 1..25: note = Oligonucleotide
  source 1..25: mol_type = other DNA
cacatgcatgctcccgccagccagg

SEQ ID NO: 34255 - DNA, 25 bp, synthetic construct
  misc_feature 1..25: note = Oligonucleotide
  source 1..25: mol_type = other DNA
tcccacatgcatgctcccgccagcc

SEQ ID NO: 34256 - DNA, 25 bp, synthetic construct
  misc_feature 1..25: note = Oligonucleotide
  source 1..25: mol_type = other DNA
acgtcccacatgcatgctcccgcca

SEQ ID NO: 34257 - DNA, 25 bp, synthetic construct
  misc_feature 1..25: note = Oligonucleotide
  source 1..25: mol_type = other DNA
cccacgtcccacatgcatgctcccg

SEQ ID NO: 34258 - DNA, 25 bp, synthetic construct
  misc_feature 1..25: note = Oligonucleotide
  source 1..25: mol_type = other DNA
tgccccacgtcccacatgcatgctc

SEQ ID NO: 34259 - DNA, 25 bp, synthetic construct
  misc_feature 1..25: note = Oligonucleotide
  source 1..25: mol_type = other DNA
tcctgccccacgtcccacatgcatg

SEQ ID NO: 34260 - DNA, 25 bp, synthetic construct
  misc_feature 1..25: note = Oligonucleotide
  source 1..25: mol_type = other DNA
aggtcctgccccacgtcccacatgc

SEQ ID NO: 34261 - DNA, 25 bp, synthetic construct
  misc_feature 1..25: note = Oligonucleotide
  source 1..25: mol_type = other DNA
tgcaggtcctgccccacgtcccaca

SEQ ID NO: 34262 - DNA, 25 bp, synthetic construct
  misc_feature 1..25: note = Oligonucleotide
  source 1..25: mol_type = other DNA
cactgcaggtcctgccccacgtccc

SEQ ID NO: 34263 - DNA, 25 bp, synthetic construct
  misc_feature 1..25: note = Oligonucleotide
  source 1..25: mol_type = other DNA
ctacactgcaggtcctgccccacgt

SEQ ID NO: 34264 - DNA, 25 bp, synthetic construct
  misc_feature 1..25: note = Oligonucleotide
  source 1..25: mol_type = other DNA
cctctacactgcaggtcctgcccca

SEQ ID NO: 34265 - DNA, 25 bp, synthetic construct
  misc_feature 1..25: note = Oligonucleotide
  source 1..25: mol_type = other DNA
ctccctctacactgcaggtcctgcc

SEQ ID NO: 34266 - DNA, 25 bp, synthetic construct
  misc_feature 1..25: note = Oligonucleotide
  source 1..25: mol_type = other DNA
ggcctccctctacactgcaggtcct

SEQ ID NO: 34267 - DNA, 25 bp, synthetic construct
  misc_feature 1..25: note = Oligonucleotide
  source 1..25: mol_type = other DNA
cctggcctccctctacactgcaggt

SEQ ID NO: 34268 - DNA, 25 bp, synthetic construct
  misc_feature 1..25: note = Oligonucleotide
  source 1..25: mol_type = other DNA
atacctggcctccctctacactgca

SEQ ID NO: 34269 - DNA, 25 bp, synthetic construct
  misc_feature 1..25: note = Oligonucleotide
  source 1..25: mol_type = other DNA
ttcatacctggcctccctctacact

SEQ ID NO: 34270 - DNA, 25 bp, synthetic construct
  misc_feature 1..25: note = Oligonucleotide
  source 1..25: mol_type = other DNA
ctcttcatacctggcctccctctac

SEQ ID NO: 34271 - DNA, 25 bp, synthetic construct
  misc_feature 1..25: note = Oligonucleotide
  source 1..25: mol_type = other DNA
gacctcttcatacctggcctccctc

SEQ ID NO: 34272 - DNA, 25 bp, synthetic construct
  misc_feature 1..25: note = Oligonucleotide
  source 1..25: mol_type = other DNA
tctgacctcttcatacctggcctcc

SEQ ID NO: 34273 - DNA, 25 bp, synthetic construct
  misc_feature 1..25: note = Oligonucleotide
  source 1..25: mol_type = other DNA
tcctctgacctcttcatacctggcc

SEQ ID NO: 34274 - DNA, 25 bp, synthetic construct
  misc_feature 1..25: note = Oligonucleotide
  source 1..25: mol_type = other DNA
ccctcctctgacctcttcatacctg

SEQ ID NO: 34275 - DNA, 25 bp, synthetic construct
  misc_feature 1..25: note = Oligonucleotide
  source 1..25: mol_type = other DNA
ttgccctcctctgacctcttcatac

SEQ ID NO: 34276 - DNA, 25 bp, synthetic construct
  misc_feature 1..25: note = Oligonucleotide
  source 1..25: mol_type = other DNA
cccttgccctcctctgacctcttca

SEQ ID NO: 34277 - DNA, 25 bp, synthetic construct
  misc_feature 1..25: note = Oligonucleotide
  source 1..25: mol_type = other DNA
attcccttgccctcctctgacctct

SEQ ID NO: 34278 - DNA, 25 bp, synthetic construct
  misc_feature 1..25: note = Oligonucleotide
  source 1..25: mol_type = other DNA
cacattcccttgccctcctctgacc

SEQ ID NO: 34279 - DNA, 25 bp, synthetic construct
  misc_feature 1..25: note = Oligonucleotide
  source 1..25: mol_type = other DNA
aggcacattcccttgccctcctctg

SEQ ID NO: 34280 - DNA, 25 bp, synthetic construct
  misc_feature 1..25: note = Oligonucleotide
  source 1..25: mol_type = other DNA
gccaggcacattcccttgccctcct

SEQ ID NO: 34281 - DNA, 25 bp, synthetic construct
  misc_feature 1..25: note = Oligonucleotide
  source 1..25: mol_type = other DNA
tcggccaggcacattcccttgccct

SEQ ID NO: 34282 - DNA, 25 bp, synthetic construct
  misc_feature 1..25: note = Oligonucleotide
  source 1..25: mol_type = other DNA
aggtcggccaggcacattcccttgc

SEQ ID NO: 34283 - DNA, 25 bp, synthetic construct
  misc_feature 1..25: note = Oligonucleotide
  source 1..25: mol_type = other DNA
gagaggtcggccaggcacattccct

SEQ ID NO: 34284 - DNA, 25 bp, synthetic construct
  misc_feature 1..25: note = Oligonucleotide
  source 1..25: mol_type = other DNA
gaagagaggtcggccaggcacattc

SEQ ID NO: 34285 - DNA, 25 bp, synthetic construct
  misc_feature 1..25: note = Oligonucleotide
  source 1..25: mol_type = other DNA
gcagaagagaggtcggccaggcaca

SEQ ID NO: 34286 - DNA, 25 bp, synthetic construct
  misc_feature 1..25: note = Oligonucleotide
  source 1..25: mol_type = other DNA
gcagcagaagagaggtcggccaggc

SEQ ID NO: 34287 - DNA, 25 bp, synthetic construct
  misc_feature 1..25: note = Oligonucleotide
  source 1..25: mol_type = other DNA
cgggcagcagaagagaggtcggcca

SEQ ID NO: 34288 - DNA, 25 bp, synthetic construct
  misc_feature 1..25: note = Oligonucleotide
  source 1..25: mol_type = other DNA
ggccgggcagcagaagagaggtcgg

SEQ ID NO: 34289 - DNA, 25 bp, synthetic construct
  misc_feature 1..25: note = Oligonucleotide
  source 1..25: mol_type = other DNA
acaggccgggcagcagaagagaggt

SEQ ID NO: 34290 - DNA, 25 bp, synthetic construct
  misc_feature 1..25: note = Oligonucleotide
  source 1..25: mol_type = other DNA
ctgacaggccgggcagcagaagaga

SEQ ID NO: 34291 - DNA, 25 bp, synthetic construct
  misc_feature 1..25: note = Oligonucleotide
  source 1..25: mol_type = other DNA
ggactgacaggccgggcagcagaag

SEQ ID NO: 34292 - DNA, 25 bp, synthetic construct
  misc_feature 1..25: note = Oligonucleotide
  source 1..25: mol_type = other DNA
ccgggactgacaggccgggcagcag

SEQ ID NO: 34293 - DNA, 25 bp, synthetic construct
  misc_feature 1..25: note = Oligonucleotide
  source 1..25: mol_type = other DNA
accccgggactgacaggccgggcag

SEQ ID NO: 34294 - DNA, 25 bp, synthetic construct
  misc_feature 1..25: note = Oligonucleotide
  source 1..25: mol_type = other DNA
gtcaccccgggactgacaggccggg

SEQ ID NO: 34295 - DNA, 25 bp, synthetic construct
  misc_feature 1..25: note = Oligonucleotide
  source 1..25: mol_type = other DNA
gcagtcaccccgggactgacaggcc

SEQ ID NO: 34296 - DNA, 25 bp, synthetic construct
  misc_feature 1..25: note = Oligonucleotide
  source 1..25: mol_type = other DNA
cctgcagtcaccccgggactgacag

SEQ ID NO: 34297 - DNA, 25 bp, synthetic construct
  misc_feature 1..25: note = Oligonucleotide
  source 1..25: mol_type = other DNA
caccctgcagtcaccccgggactga

SEQ ID NO: 34298 - DNA, 25 bp, synthetic construct
  misc_feature 1..25: note = Oligonucleotide
  source 1..25: mol_type = other DNA
gtccaccctgcagtcaccccgggac

SEQ ID NO: 34299 - DNA, 25 bp, synthetic construct
  misc_feature 1..25: note = Oligonucleotide
  source 1..25: mol_type = other DNA
acagtccaccctgcagtcaccccgg

SEQ ID NO: 34300 - DNA, 25 bp, synthetic construct
  misc_feature 1..25: note = Oligonucleotide
  source 1..25: mol_type = other DNA
gccacagtccaccctgcagtcaccc

SEQ ID NO: 34301 - DNA, 25 bp, synthetic construct
  misc_feature 1..25: note = Oligonucleotide
  source 1..25: mol_type = other DNA
ccggccacagtccaccctgcagtca

SEQ ID NO: 34302 - DNA, 25 bp, synthetic construct
  misc_feature 1..25: note = Oligonucleotide
  source 1..25: mol_type = other DNA
tggccggccacagtccaccctgcag

SEQ ID NO: 34303 - DNA, 25 bp, synthetic construct
  misc_feature 1..25: note = Oligonucleotide
  source 1..25: mol_type = other DNA
ggttggccggccacagtccaccctg

SEQ ID NO: 34304 - DNA, 25 bp, synthetic construct
  misc_feature 1..25: note = Oligonucleotide
  source 1..25: mol_type = other DNA
cgaggttggccggccacagtccacc

SEQ ID NO: 34305 - DNA, 25 bp, synthetic construct
  misc_feature 1..25: note = Oligonucleotide
  source 1..25: mol_type = other DNA
cctcgaggttggccggccacagtcc

SEQ ID NO: 34306 - DNA, 25 bp, synthetic construct
  misc_feature 1..25: note = Oligonucleotide
  source 1..25: mol_type = other DNA
ctgcctcgaggttggccggccacag

SEQ ID NO: 34307 - DNA, 25 bp, synthetic construct
  misc_feature 1..25: note = Oligonucleotide
  source 1..25: mol_type = other DNA
gccctgcctcgaggttggccggcca

SEQ ID NO: 34308 - DNA, 25 bp, synthetic construct
  misc_feature 1..25: note = Oligonucleotide
  source 1..25: mol_type = other DNA
taagccctgcctcgaggttggccgg

SEQ ID NO: 34309 - DNA, 25 bp, synthetic construct
  misc_feature 1..25: note = Oligonucleotide
  source 1..25: mol_type = other DNA
aggtaagccctgcctcgaggttggc

SEQ ID NO: 34310 - DNA, 25 bp, synthetic construct
  misc_feature 1..25: note = Oligonucleotide
  source 1..25: mol_type = other DNA
gtgaggtaagccctgcctcgaggtt

SEQ ID NO: 34311 - DNA, 25 bp, synthetic construct
  misc_feature 1..25: note = Oligonucleotide
  source 1..25: mol_type = other DNA
ggagtgaggtaagccctgcctcgag

SEQ ID NO: 34312 - DNA, 25 bp, synthetic construct
  misc_feature 1..25: note = Oligonucleotide
  source 1..25: mol_type = other DNA
ggaggagtgaggtaagccctgcctc

SEQ ID NO: 34313 - DNA, 25 bp, synthetic construct
  misc_feature 1..25: note = Oligonucleotide
  source 1..25: mol_type = other DNA
cagggaggagtgaggtaagccctgc

SEQ ID NO: 34314 - DNA, 25 bp, synthetic construct
  misc_feature 1..25: note = Oligonucleotide
  source 1..25: mol_type = other DNA
aagcagggaggagtgaggtaagccc

SEQ ID NO: 34315 - DNA, 25 bp, synthetic construct
  misc_feature 1..25: note = Oligonucleotide
  source 1..25: mol_type = other DNA
ggaaagcagggaggagtgaggtaag

SEQ ID NO: 34316 - DNA, 25 bp, synthetic construct
  misc_feature 1..25: note = Oligonucleotide
  source 1..25: mol_type = other DNA
gaaggaaagcagggaggagtgaggt

SEQ ID NO: 34317 - DNA, 25 bp, synthetic construct
  misc_feature 1..25: note = Oligonucleotide
  source 1..25: mol_type = other DNA
gatgaaggaaagcagggaggagtga

SEQ ID NO: 34318 - DNA, 25 bp, synthetic construct
  misc_feature 1..25: note = Oligonucleotide
  source 1..25: mol_type = other DNA
gctgatgaaggaaagcagggaggag

SEQ ID NO: 34319 - DNA, 25 bp, synthetic construct
  misc_feature 1..25: note = Oligonucleotide
  source 1..25: mol_type = other DNA
atcgctgatgaaggaaagcagggag

SEQ ID NO: 34320 - DNA, 25 bp, synthetic construct
  misc_feature 1..25: note = Oligonucleotide
  source 1..25: mol_type = other DNA
ataatcgctgatgaaggaaagcagg

SEQ ID NO: 34321 - DNA, 25 bp, synthetic construct
  misc_feature 1..25: note = Oligonucleotide
  source 1..25: mol_type = other DNA
gacataatcgctgatgaaggaaagc

SEQ ID NO: 34322 - DNA, 25 bp, synthetic construct
  misc_feature 1..25: note = Oligonucleotide
  source 1..25: mol_type = other DNA
aatgacataatcgctgatgaaggaa

SEQ ID NO: 34323 - DNA, 25 bp, synthetic construct
  misc_feature 1..25: note = Oligonucleotide
  source 1..25: mol_type = other DNA
atcaatgacataatcgctgatgaag

SEQ ID NO: 34324 - DNA, 25 bp, synthetic construct
  misc_feature 1..25: note = Oligonucleotide
  source 1..25: mol_type = other DNA
gtcatcaatgacataatcgctgatg

SEQ ID NO: 34325 - DNA, 25 bp, synthetic construct
  misc_feature 1..25: note = Oligonucleotide
  source 1..25: mol_type = other DNA
tttgtcatcaatgacataatcgctg

SEQ ID NO: 34326 - DNA, 25 bp, synthetic construct
  misc_feature 1..25: note = Oligonucleotide
  source 1..25: mol_type = other DNA
cactttgtcatcaatgacataatcg

SEQ ID NO: 34327 - DNA, 25 bp, synthetic construct
  misc_feature 1..25: note = Oligonucleotide
  source 1..25: mol_type = other DNA
agccactttgtcatcaatgacataa

SEQ ID NO: 34328 - DNA, 25 bp, synthetic construct
  misc_feature 1..25: note = Oligonucleotide
  source 1..25: mol_type = other DNA
gacagccactttgtcatcaatgaca

SEQ ID NO: 34329 - DNA, 25 bp, synthetic construct
  misc_feature 1..25: note = Oligonucleotide
  source 1..25: mol_type = other DNA
caggacagccactttgtcatcaatg

SEQ ID NO: 34330 - DNA, 25 bp, synthetic construct
  misc_feature 1..25: note = Oligonucleotide
  source 1..25: mol_type = other DNA
ctgcaggacagccactttgtcatca

SEQ ID NO: 34331 - DNA, 25 bp, synthetic construct
  misc_feature 1..25: note = Oligonucleotide
  source 1..25: mol_type = other DNA
tttctgcaggacagccactttgtca

SEQ ID NO: 34332 - DNA, 25 bp, synthetic construct
  misc_feature 1..25: note = Oligonucleotide
  source 1..25: mol_type = other DNA
ccgtttctgcaggacagccactttg

SEQ ID NO: 34333 - DNA, 25 bp, synthetic construct
  misc_feature 1..25: note = Oligonucleotide
  source 1..25: mol_type = other DNA
gtcccgtttctgcaggacagccact

SEQ ID NO: 34334 - DNA, 25 bp, synthetic construct
  misc_feature 1..25: note = Oligonucleotide
  source 1..25: mol_type = other DNA
gtggtcccgtttctgcaggacagcc

SEQ ID NO: 34335 - DNA, 25 bp, synthetic construct
  misc_feature 1..25: note = Oligonucleotide
  source 1..25: mol_type = other DNA
ctcgtggtcccgtttctgcaggaca

SEQ ID NO: 34336 - DNA, 25 bp, synthetic construct
  misc_feature 1..25: note = Oligonucleotide
  source 1..25: mol_type = other DNA
gccctcgtggtcccgtttctgcagg

SEQ ID NO: 34337 - DNA, 25 bp, synthetic construct
  misc_feature 1..25: note = Oligonucleotide
  source 1..25: mol_type = other DNA
aaagccctcgtggtcccgtttctgc

SEQ ID NO: 34338 - DNA, 25 bp, synthetic construct
  misc_feature 1..25: note = Oligonucleotide
  source 1..25: mol_type = other DNA
accaaagccctcgtggtcccgtttc

SEQ ID NO: 34339 - DNA, 25 bp, synthetic construct
  misc_feature 1..25: note = Oligonucleotide
  source 1..25: mol_type = other DNA
aaaaccaaagccctcgtggtcccgt

SEQ ID NO: 34340 - DNA, 25 bp, synthetic construct
  misc_feature 1..25: note = Oligonucleotide
  source 1..25: mol_type = other DNA
cacaaaaccaaagccctcgtggtcc

SEQ ID NO: 34341 - DNA, 25 bp, synthetic construct
  misc_feature 1..25: note = Oligonucleotide
  source 1..25: mol_type = other DNA
gagcacaaaaccaaagccctcgtgg

SEQ ID NO: 34342 - DNA, 25 bp, synthetic construct
  misc_feature 1..25: note = Oligonucleotide
  source 1..25: mol_type = other DNA
ccggagcacaaaaccaaagccctcg

SEQ ID NO: 34343 - DNA, 25 bp, synthetic construct
  misc_feature 1..25: note = Oligonucleotide
  source 1..25: mol_type = other DNA
tccccggagcacaaaaccaaagccc

SEQ ID NO: 34344 - DNA, 25 bp, synthetic construct
  misc_feature 1..25: note = Oligonucleotide
  source 1..25: mol_type = other DNA
ggctccccggagcacaaaaccaaag

SEQ ID NO: 34345 - DNA, 25 bp, synthetic construct
  misc_feature 1..25: note = Oligonucleotide
  source 1..25: mol_type = other DNA
tttggctccccggagcacaaaacca

SEQ ID NO: 34346 - DNA, 25 bp, synthetic construct
  misc_feature 1..25: note = Oligonucleotide
  source 1..25: mol_type = other DNA
acctttggctccccggagcacaaaa

SEQ ID NO: 34347 - DNA, 25 bp, synthetic construct
  misc_feature 1..25: note = Oligonucleotide
  source 1..25: mol_type = other DNA
attacctttggctccccggagcaca

SEQ ID NO: 34348 - DNA, 25 bp, synthetic construct
  misc_feature 1..25: note = Oligonucleotide
  source 1..25: mol_type = other DNA
cccattacctttggctccccggagc

SEQ ID NO: 34349 - DNA, 25 bp, synthetic construct
  misc_feature 1..25: note = Oligonucleotide
  source 1..25: mol_type = other DNA
ctccccattacctttggctccccgg

SEQ ID NO: 34350 - DNA, 25 bp, synthetic construct
  misc_feature 1..25: note = Oligonucleotide
  source 1..25: mol_type = other DNA
ccactccccattacctttggctccc

SEQ ID NO: 34351 - DNA, 25 bp, synthetic construct
  misc_feature 1..25: note = Oligonucleotide
  source 1..25: mol_type = other DNA
cacccactccccattacctttggct

SEQ ID NO: 34352 - DNA, 25 bp, synthetic construct
  misc_feature 1..25: note = Oligonucleotide
  source 1..25: mol_type = other DNA
gggcacccactccccattacctttg

SEQ ID NO: 34353 - DNA, 25 bp, synthetic construct
  misc_feature 1..25: note = Oligonucleotide
  source 1..25: mol_type = other DNA
cccgggcacccactccccattacct

SEQ ID NO: 34354 - DNA, 25 bp, synthetic construct
  misc_feature 1..25: note = Oligonucleotide
  source 1..25: mol_type = other DNA
acccccgggcacccactccccatta

SEQ ID NO: 34355 - DNA, 25 bp, synthetic construct
  misc_feature 1..25: note = Oligonucleotide
  source 1..25: mol_type = other DNA
ctgacccccgggcacccactcccca

SEQ ID NO: 34356 - DNA, 25 bp, synthetic construct
  misc_feature 1..25: note = Oligonucleotide
  source 1..25: mol_type = other DNA
tgcctgacccccgggcacccactcc

SEQ ID NO: 34357 - DNA, 25 bp, synthetic construct
  misc_feature 1..25: note = Oligonucleotide
  source 1..25: mol_type = other DNA
gcctgcctgacccccgggcacccac

SEQ ID NO: 34358 - DNA, 25 bp, synthetic construct
  misc_feature 1..25: note = Oligonucleotide
  source 1..25: mol_type = other DNA
cctgcctgcctgacccccgggcacc

SEQ ID NO: 34359 - DNA, 25 bp, synthetic construct
  misc_feature 1..25: note = Oligonucleotide
  source 1..25: mol_type = other DNA
gcccctgcctgcctgacccccgggc

SEQ ID NO: 34360 - DNA, 25 bp, synthetic construct
  misc_feature 1..25: note = Oligonucleotide
  source 1..25: mol_type = other DNA
gcagcccctgcctgcctgacccccg

SEQ ID NO: 34361 - DNA, 25 bp, synthetic construct
  misc_feature 1..25: note = Oligonucleotide
  source 1..25: mol_type = other DNA
tgtgcagcccctgcctgcctgaccc

SEQ ID NO: 34362 - DNA, 25 bp, synthetic construct
  misc_feature 1..25: note = Oligonucleotide
  source 1..25: mol_type = other DNA
cggtgtgcagcccctgcctgcctga

SEQ ID NO: 34363 - DNA, 25 bp, synthetic construct
  misc_feature 1..25: note = Oligonucleotide
  source 1..25: mol_type = other DNA
gagcggtgtgcagcccctgcctgcc

SEQ ID NO: 34364 - DNA, 25 bp, synthetic construct
  misc_feature 1..25: note = Oligonucleotide
  source 1..25: mol_type = other DNA
cctgagcggtgtgcagcccctgcct

SEQ ID NO: 34365 - DNA, 25 bp, synthetic construct
  misc_feature 1..25: note = Oligonucleotide
  source 1..25: mol_type = other DNA
atccctgagcggtgtgcagcccctg

SEQ ID NO: 34366 - DNA, 25 bp, synthetic construct
  misc_feature 1..25: note = Oligonucleotide
  source 1..25: mol_type = other DNA
gacatccctgagcggtgtgcagccc

SEQ ID NO: 34367 - DNA, 25 bp, synthetic construct
  misc_feature 1..25: note = Oligonucleotide
  source 1..25: mol_type = other DNA
gaagacatccctgagcggtgtgcag

SEQ ID NO: 34368 - DNA, 25 bp, synthetic construct
  misc_feature 1..25: note = Oligonucleotide
  source 1..25: mol_type = other DNA
gctgaagacatccctgagcggtgtg

SEQ ID NO: 34369 - DNA, 25 bp, synthetic construct
  misc_feature 1..25: note = Oligonucleotide
  source 1..25: mol_type = other DNA
gaagctgaagacatccctgagcggt

SEQ ID NO: 34370 - DNA, 25 bp, synthetic construct
  misc_feature 1..25: note = Oligonucleotide
  source 1..25: mol_type = other DNA
caagaagctgaagacatccctgagc

SEQ ID NO: 34371 - DNA, 25 bp, synthetic construct
  misc_feature 1..25: note = Oligonucleotide
  source 1..25: mol_type = other DNA
aagcaagaagctgaagacatccctg

SEQ ID NO: 34372 - DNA, 25 bp, synthetic construct
  misc_feature 1..25: note = Oligonucleotide
  source 1..25: mol_type = other DNA
cagaagcaagaagctgaagacatcc

SEQ ID NO: 34373 - DNA, 25 bp, synthetic construct
  misc_feature 1..25: note = Oligonucleotide
  source 1..25: mol_type = other DNA
gggcagaagcaagaagctgaagaca

SEQ ID NO: 34374 - DNA, 25 bp, synthetic construct
  misc_feature 1..25: note = Oligonucleotide
  source 1..25: mol_type = other DNA
tgggggcagaagcaagaagctgaag

SEQ ID NO: 34375 - DNA, 25 bp, synthetic construct
  misc_feature 1..25: note = Oligonucleotide
  source 1..25: mol_type = other DNA
agttgggggcagaagcaagaagctg

SEQ ID NO: 34376 - DNA, 25 bp, synthetic construct
  misc_feature 1..25: note = Oligonucleotide
  source 1..25: mol_type = other DNA
cagagttgggggcagaagcaagaag

SEQ ID NO: 34377 - DNA, 25 bp, synthetic construct
  misc_feature 1..25: note = Oligonucleotide
  source 1..25: mol_type = other DNA
gagcagagttgggggcagaagcaag

SEQ ID NO: 34378 - DNA, 25 bp, synthetic construct
  misc_feature 1..25: note = Oligonucleotide
  source 1..25: mol_type = other DNA
gcagagcagagttgggggcagaagc

SEQ ID NO: 34379 - DNA, 25 bp, synthetic construct
  misc_feature 1..25: note = Oligonucleotide
  source 1..25: mol_type = other DNA
ggggcagagcagagttgggggcaga

SEQ ID NO: 34380 - DNA, 25 bp, synthetic construct
  misc_feature 1..25: note = Oligonucleotide
  source 1..25: mol_type = other DNA
tgtggggcagagcagagttgggggc

SEQ ID NO: 34381 - DNA, 25 bp, synthetic construct
  misc_feature 1..25: note = Oligonucleotide
  source 1..25: mol_type = other DNA
gagtgtggggcagagcagagttggg

SEQ ID NO: 34382 - DNA, 25 bp, synthetic construct
  misc_feature 1..25: note = Oligonucleotide
  source 1..25: mol_type = other DNA
agggagtgtggggcagagcagagtt

SEQ ID NO: 34383 - DNA, 25 bp, synthetic construct
  misc_feature 1..25: note = Oligonucleotide
  source 1..25: mol_type = other DNA
gggagggagtgtggggcagagcaga

SEQ ID NO: 34384 - DNA, 25 bp, synthetic construct
  misc_feature 1..25: note = Oligonucleotide
  source 1..25: mol_type = other DNA
gcagggagggagtgtggggcagagc

SEQ ID NO: 34385 - DNA, 25 bp, synthetic construct
  misc_feature 1..25: note = Oligonucleotide
  source 1..25: mol_type = other DNA
aaggcagggagggagtgtggggcag

SEQ ID NO: 34386 - DNA, 25 bp, synthetic construct
  misc_feature 1..25: note = Oligonucleotide
  source 1..25: mol_type = other DNA
ggcaaggcagggagggagtgtgggg

SEQ ID NO: 34387 - DNA, 25 bp, synthetic construct
  misc_feature 1..25: note = Oligonucleotide
  source 1..25: mol_type = other DNA
aggggcaaggcagggagggagtgtg

SEQ ID NO: 34388 - DNA, 25 bp, synthetic construct
  misc_feature 1..25: note = Oligonucleotide
  source 1..25: mol_type = other DNA
cgcaggggcaaggcagggagggagt

SEQ ID NO: 34389 - DNA, 25 bp, synthetic construct
  misc_feature 1..25: note = Oligonucleotide
  source 1..25: mol_type = other DNA
agccgcaggggcaaggcagggaggg

SEQ ID NO: 34390 - DNA, 25 bp, synthetic construct
  misc_feature 1..25: note = Oligonucleotide
  source 1..25: mol_type = other DNA
gggagccgcaggggcaaggcaggga

SEQ ID NO: 34391 - DNA, 25 bp, synthetic construct
  misc_feature 1..25: note = Oligonucleotide
  source 1..25: mol_type = other DNA
agcgggagccgcaggggcaaggcag

SEQ ID NO: 34392 - DNA, 25 bp, synthetic construct
  misc_feature 1..25: note = Oligonucleotide
  source 1..25: mol_type = other DNA
aaaagcgggagccgcaggggcaagg

SEQ ID NO: 34393 - DNA, 25 bp, synthetic construct
  misc_feature 1..25: note = Oligonucleotide
  source 1..25: mol_type = other DNA
gccaaaagcgggagccgcaggggca

SEQ ID NO: 34394 - DNA, 25 bp, synthetic construct
  misc_feature 1..25: note = Oligonucleotide
  source 1..25: mol_type = other DNA
ggggccaaaagcgggagccgcaggg

SEQ ID NO: 34395 - DNA, 25 bp, synthetic construct
  misc_feature 1..25: note = Oligonucleotide
  source 1..25: mol_type = other DNA
gccggggccaaaagcgggagccgca

SEQ ID NO: 34396 - DNA, 25 bp, synthetic construct
  misc_feature 1..25: note = Oligonucleotide
  source 1..25: mol_type = other DNA
aaagccggggccaaaagcgggagcc

SEQ ID NO: 34397 - DNA, 25 bp, synthetic construct
  misc_feature 1..25: note = Oligonucleotide
  source 1..25: mol_type = other DNA
aggaaagccggggccaaaagcggga

SEQ ID NO: 34398 - DNA, 25 bp, synthetic construct
  misc_feature 1..25: note = Oligonucleotide
  source 1..25: mol_type = other DNA
accaggaaagccggggccaaaagcg

SEQ ID NO: 34399 - DNA, 25 bp, synthetic construct
  misc_feature 1..25: note = Oligonucleotide
  source 1..25: mol_type = other DNA
ggaaccaggaaagccggggccaaaa

SEQ ID NO: 34400 - DNA, 25 bp, synthetic construct
  misc_feature 1..25: note = Oligonucleotide
  source 1..25: mol_type = other DNA
agaggaaccaggaaagccggggcca

SEQ ID NO: 34401 - DNA, 25 bp, synthetic construct
  misc_feature 1..25: note = Oligonucleotide
  source 1..25: mol_type = other DNA
agcagaggaaccaggaaagccgggg

SEQ ID NO: 34402 - DNA, 25 bp, synthetic construct
  misc_feature 1..25: note = Oligonucleotide
  source 1..25: mol_type = other DNA
ccgagcagaggaaccaggaaagccg

SEQ ID NO: 34403 - DNA, 25 bp, synthetic construct
  misc_feature 1..25: note = Oligonucleotide
  source 1..25: mol_type = other DNA
cgaccgagcagaggaaccaggaaag

SEQ ID NO: 34404 - DNA, 25 bp, synthetic construct
  misc_feature 1..25: note = Oligonucleotide
  source 1..25: mol_type = other DNA
tcgcgaccgagcagaggaaccagga

SEQ ID NO: 34405 - DNA, 25 bp, synthetic construct
  misc_feature 1..25: note = Oligonucleotide
  source 1..25: mol_type = other DNA
cggtcgcgaccgagcagaggaacca

SEQ ID NO: 34406 - DNA, 25 bp, synthetic construct
  misc_feature 1..25: note = Oligonucleotide
  source 1..25: mol_type = other DNA
cgacggtcgcgaccgagcagaggaa

SEQ ID NO: 34407 - DNA, 25 bp, synthetic construct
  misc_feature 1..25: note = Oligonucleotide
  source 1..25: mol_type = other DNA
ccacgacggtcgcgaccgagcagag

SEQ ID NO: 34408 - DNA, 25 bp, synthetic construct
  misc_feature 1..25: note = Oligonucleotide
  source 1..25: mol_type = other DNA
aaaccacgacggtcgcgaccgagca

SEQ ID NO: 34409 - DNA, 25 bp, synthetic construct
  misc_feature 1..25: note = Oligonucleotide
  source 1..25: mol_type = other DNA
tgcaaaccacgacggtcgcgaccga

SEQ ID NO: 34410 - DNA, 25 bp, synthetic construct
  misc_feature 1..25: note = Oligonucleotide
  source 1..25: mol_type = other DNA
cgttgcaaaccacgacggtcgcgac

SEQ ID NO: 34411 - DNA, 25 bp, synthetic construct
  misc_feature 1..25: note = Oligonucleotide
  source 1..25: mol_type = other DNA
ggacgttgcaaaccacgacggtcgc

SEQ ID NO: 34412 - DNA, 25 bp, synthetic construct
  misc_feature 1..25: note = Oligonucleotide
  source 1..25: mol_type = other DNA
ccgggacgttgcaaaccacgacggt

SEQ ID NO: 34413 - DNA, 25 bp, synthetic construct
  misc_feature 1..25: note = Oligonucleotide
  source 1..25: mol_type = other DNA
gggccgggacgttgcaaaccacgac

SEQ ID NO: 34414 - DNA, 25 bp, synthetic construct
  misc_feature 1..25: note = Oligonucleotide
  source 1..25: mol_type = other DNA
cctgggccgggacgttgcaaaccac

SEQ ID NO: 34415 - DNA, 25 bp, synthetic construct
  misc_feature 1..25: note = Oligonucleotide
  source 1..25: mol_type = other DNA
ccgcctgggccgggacgttgcaaac

SEQ ID NO: 34416 - DNA, 25 bp, synthetic construct
  misc_feature 1..25: note = Oligonucleotide
  source 1..25: mol_type = other DNA
ttgccgcctgggccgggacgttgca

SEQ ID NO: 34417 - DNA, 25 bp, synthetic construct
  misc_feature 1..25: note = Oligonucleotide
  source 1..25: mol_type = other DNA
gaattgccgcctgggccgggacgtt

SEQ ID NO: 34418 - DNA, 25 bp, synthetic construct
  misc_feature 1..25: note = Oligonucleotide
  source 1..25: mol_type = other DNA
aaggaattgccgcctgggccgggac

SEQ ID NO: 34419 - DNA, 25 bp, synthetic construct
  misc_feature 1..25: note = Oligonucleotide
  source 1..25: mol_type = other DNA
gggaaggaattgccgcctgggccgg

SEQ ID NO: 34420 - DNA, 25 bp, synthetic construct
  misc_feature 1..25: note = Oligonucleotide
  source 1..25: mol_type = other DNA
gaagggaaggaattgccgcctgggc

SEQ ID NO: 34421 - DNA, 25 bp, synthetic construct
  misc_feature 1..25: note = Oligonucleotide
  source 1..25: mol_type = other DNA
aacgaagggaaggaattgccgcctg

SEQ ID NO: 34422 - DNA, 25 bp, synthetic construct
  misc_feature 1..25: note = Oligonucleotide
  source 1..25: mol_type = other DNA
aacaacgaagggaaggaattgccgc

SEQ ID NO: 34423 - DNA, 25 bp, synthetic construct
  misc_feature 1..25: note = Oligonucleotide
  source 1..25: mol_type = other DNA
gaaaacaacgaagggaaggaattgc

SEQ ID NO: 34424 - DNA, 25 bp, synthetic construct
  misc_feature 1..25: note = Oligonucleotide
  source 1..25: mol_type = other DNA
gtggaaaacaacgaagggaaggaat

SEQ ID NO: 34425 - DNA, 25 bp, synthetic construct
  misc_feature 1..25: note = Oligonucleotide
  source 1..25: mol_type = other DNA
acagtggaaaacaacgaagggaagg

SEQ ID NO: 34426 - DNA, 25 bp, synthetic construct
  misc_feature 1..25: note = Oligonucleotide
  source 1..25: mol_type = other DNA
aagacagtggaaaacaacgaaggga

SEQ ID NO: 34427 - DNA, 25 bp, synthetic construct
  misc_feature 1..25: note = Oligonucleotide
  source 1..25: mol_type = other DNA
gcaaagacagtggaaaacaacgaag

SEQ ID NO: 34428 - DNA, 25 bp, synthetic construct
  misc_feature 1..25: note = Oligonucleotide
  source 1..25: mol_type = other DNA
agagcaaagacagtggaaaacaacg

SEQ ID NO: 34429 - DNA, 25 bp, synthetic construct
  misc_feature 1..25: note = Oligonucleotide
  source 1..25: mol_type = other DNA
tctagagcaaagacagtggaaaaca

SEQ ID NO: 34430 - DNA, 25 bp, synthetic construct
  misc_feature 1..25: note = Oligonucleotide
  source 1..25: mol_type = other DNA
gactctagagcaaagacagtggaaa

SEQ ID NO: 34431 - DNA, 25 bp, synthetic construct
  misc_feature 1..25: note = Oligonucleotide
  source 1..25: mol_type = other DNA
ttagactctagagcaaagacagtgg

SEQ ID NO: 34432 - DNA, 25 bp, synthetic construct
  misc_feature 1..25: note = Oligonucleotide
  source 1..25: mol_type = other DNA
cggttagactctagagcaaagacag

SEQ ID NO: 34433 - DNA, 25 bp, synthetic construct
  misc_feature 1..25: note = Oligonucleotide
  source 1..25: mol_type = other DNA
actcggttagactctagagcaaaga

SEQ ID NO: 34434 - DNA, 25 bp, synthetic construct
  misc_feature 1..25: note = Oligonucleotide
  source 1..25: mol_type = other DNA
cccactcggttagactctagagcaa

SEQ ID NO: 34435 - DNA, 25 bp, synthetic construct
  misc_feature 1..25: note = Oligonucleotide
  source 1..25: mol_type = other DNA
gcccccactcggttagactctagag

SEQ ID NO: 34436 - DNA, 25 bp, synthetic construct
  misc_feature 1..25: note = Oligonucleotide
  source 1..25: mol_type = other DNA
aaagcccccactcggttagactcta

SEQ ID NO: 34437 - DNA, 25 bp, synthetic construct
  misc_feature 1..25: note = Oligonucleotide
  source 1..25: mol_type = other DNA
agaaaagcccccactcggttagact

SEQ ID NO: 34438 - DNA, 25 bp, synthetic construct
  misc_feature 1..25: note = Oligonucleotide
  source 1..25: mol_type = other DNA
gccagaaaagcccccactcggttag

SEQ ID NO: 34439 - DNA, 25 bp, synthetic construct
  misc_feature 1..25: note = Oligonucleotide
  source 1..25: mol_type = other DNA
catgccagaaaagcccccactcggt

SEQ ID NO: 34440 - DNA, 25 bp, synthetic construct
  misc_feature 1..25: note = Oligonucleotide
  source 1..25: mol_type = other DNA
gcccatgccagaaaagcccccactc

SEQ ID NO: 34441 - DNA, 25 bp, synthetic construct
  misc_feature 1..25: note = Oligonucleotide
  source 1..25: mol_type = other DNA
tttgcccatgccagaaaagccccca

SEQ ID NO: 34442 - DNA, 25 bp, synthetic construct
  misc_feature 1..25: note = Oligonucleotide
  source 1..25: mol_type = other DNA
ccctttgcccatgccagaaaagccc

SEQ ID NO: 34443 - DNA, 25 bp, synthetic construct
  misc_feature 1..25: note = Oligonucleotide
  source 1..25: mol_type = other DNA
actccctttgcccatgccagaaaag

SEQ ID NO: 34444 - DNA, 25 bp, synthetic construct
  misc_feature 1..25: note = Oligonucleotide
  source 1..25: mol_type = other DNA
aaaactccctttgcccatgccagaa

SEQ ID NO: 34445 - DNA, 25 bp, synthetic construct
  misc_feature 1..25: note = Oligonucleotide
  source 1..25: mol_type = other DNA
tgcaaaactccctttgcccatgcca

SEQ ID NO: 34446 - DNA, 25 bp, synthetic construct
  misc_feature 1..25: note = Oligonucleotide
  source 1..25: mol_type = other DNA
ctctgcaaaactccctttgcccatg

SEQ ID NO: 34447 - DNA, 25 bp, synthetic construct
  misc_feature 1..25: note = Oligonucleotide
  source 1..25: mol_type = other DNA
accctctgcaaaactccctttgccc

SEQ ID NO: 34448 - DNA, 25 bp, synthetic construct
  misc_feature 1..25: note = Oligonucleotide
  source 1..25: mol_type = other DNA
atgaccctctgcaaaactccctttg

SEQ ID NO: 34449 - DNA, 25 bp, synthetic construct
  misc_feature 1..25: note = Oligonucleotide
  source 1..25: mol_type = other DNA
gacatgaccctctgcaaaactccct

SEQ ID NO: 34450 - DNA, 25 bp, synthetic construct
  misc_feature 1..25: note = Oligonucleotide
  source 1..25: mol_type = other DNA
ctagacatgaccctctgcaaaactc

SEQ ID NO: 34451 - DNA, 25 bp, synthetic construct
  misc_feature 1..25: note = Oligonucleotide
  source 1..25: mol_type = other DNA
atcctagacatgaccctctgcaaaa

SEQ ID NO: 34452 - DNA, 25 bp, synthetic construct
  misc_feature 1..25: note = Oligonucleotide
  source 1..25: mol_type = other DNA
aggatcctagacatgaccctctgca

SEQ ID NO: 34453 - DNA, 25 bp, synthetic construct
  misc_feature 1..25: note = Oligonucleotide
  source 1..25: mol_type = other DNA
ccaaggatcctagacatgaccctct

SEQ ID NO: 34454 - DNA, 25 bp, synthetic construct
  misc_feature 1..25: note = Oligonucleotide
  source 1..25: mol_type = other DNA
ggcccaaggatcctagacatgaccc

SEQ ID NO: 34455 - DNA, 25 bp, synthetic construct
  misc_feature 1..25: note = Oligonucleotide
  source 1..25: mol_type = other DNA
gccggcccaaggatcctagacatga

SEQ ID NO: 34456 - DNA, 25 bp, synthetic construct
  misc_feature 1..25: note = Oligonucleotide
  source 1..25: mol_type = other DNA
cgagccggcccaaggatcctagaca

SEQ ID NO: 34457 - DNA, 25 bp, synthetic construct
  misc_feature 1..25: note = Oligonucleotide
  source 1..25: mol_type = other DNA
ggacgagccggcccaaggatcctag

SEQ ID NO: 34458 - DNA, 25 bp, synthetic construct
  misc_feature 1..25: note = Oligonucleotide
  source 1..25: mol_type = other DNA
cagggacgagccggcccaaggatcc

SEQ ID NO: 34459 - DNA, 25 bp, synthetic construct
  misc_feature 1..25: note = Oligonucleotide
  source 1..25: mol_type = other DNA
gcgcagggacgagccggcccaagga

SEQ ID NO: 34460 - DNA, 25 bp, synthetic construct
  misc_feature 1..25: note = Oligonucleotide
  source 1..25: mol_type = other DNA
acagcgcagggacgagccggcccaa

SEQ ID NO: 34461 - DNA, 25 bp, synthetic construct
  misc_feature 1..25: note = Oligonucleotide
  source 1..25: mol_type = other DNA
gccacagcgcagggacgagccggcc

SEQ ID NO: 34462 - DNA, 25 bp, synthetic construct
  misc_feature 1..25: note = Oligonucleotide
  source 1..25: mol_type = other DNA
ggagccacagcgcagggacgagccg

SEQ ID NO: 34463 - DNA, 25 bp, synthetic construct
  misc_feature 1..25: note = Oligonucleotide
  source 1..25: mol_type = other DNA
cggggagccacagcgcagggacgag

SEQ ID NO: 34464 - DNA, 25 bp, synthetic construct
  misc_feature 1..25: note = Oligonucleotide
  source 1..25: mol_type = other DNA
ccacggggagccacagcgcagggac

SEQ ID NO: 34465 - DNA, 25 bp, synthetic construct
  misc_feature 1..25: note = Oligonucleotide
  source 1..25: mol_type = other DNA
gggccacggggagccacagcgcagg

SEQ ID NO: 34466 - DNA, 25 bp, synthetic construct
  misc_feature 1..25: note = Oligonucleotide
  source 1..25: mol_type = other DNA
ggagggccacggggagccacagcgc

SEQ ID NO: 34467 - DNA, 25 bp, synthetic construct
  misc_feature 1..25: note = Oligonucleotide
  source 1..25: mol_type = other DNA
gggggagggccacggggagccacag

SEQ ID NO: 34468 - DNA, 25 bp, synthetic construct
  misc_feature 1..25: note = Oligonucleotide
  source 1..25: mol_type = other DNA
gctgggggagggccacggggagcca

SEQ ID NO: 34469 - DNA, 25 bp, synthetic construct
  misc_feature 1..25: note = Oligonucleotide
  source 1..25: mol_type = other DNA
ggggctgggggagggccacggggag

SEQ ID NO: 34470 - DNA, 25 bp, synthetic construct
  misc_feature 1..25: note = Oligonucleotide
  source 1..25: mol_type = other DNA
cccggggctgggggagggccacggg

SEQ ID NO: 34471 - DNA, 25 bp, synthetic construct
  misc_feature 1..25: note = Oligonucleotide
  source 1..25: mol_type = other DNA
tgacccggggctgggggagggccac

SEQ ID NO: 34472 - DNA, 25 bp, synthetic construct
  misc_feature 1..25: note = Oligonucleotide
  source 1..25: mol_type = other DNA
cagtgacccggggctgggggagggc

SEQ ID NO: 34473 - DNA, 25 bp, synthetic construct
  misc_feature 1..25: note = Oligonucleotide
  source 1..25: mol_type = other DNA
gggcagtgacccggggctgggggag

SEQ ID NO: 34474 - DNA, 25 bp, synthetic construct
  misc_feature 1..25: note = Oligonucleotide
  source 1..25: mol_type = other DNA
ggggggcagtgacccggggctgggg

SEQ ID NO: 34475 - DNA, 25 bp, synthetic construct
  misc_feature 1..25: note = Oligonucleotide
  source 1..25: mol_type = other DNA
tgcggggggcagtgacccggggctg

SEQ ID NO: 34476 - DNA, 25 bp, synthetic construct
  misc_feature 1..25: note = Oligonucleotide
  source 1..25: mol_type = other DNA
gactgcggggggcagtgacccgggg

SEQ ID NO: 34477 - DNA, 25 bp, synthetic construct
  misc_feature 1..25: note = Oligonucleotide
  source 1..25: mol_type = other DNA
gatgactgcggggggcagtgacccg

SEQ ID NO: 34478 - DNA, 25 bp, synthetic construct
  misc_feature 1..25: note = Oligonucleotide
  source 1..25: mol_type = other DNA
agagatgactgcggggggcagtgac

SEQ ID NO: 34479 - DNA, 25 bp, synthetic construct
  misc_feature 1..25: note = Oligonucleotide
  source 1..25: mol_type = other DNA
gaaagagatgactgcggggggcagt

SEQ ID NO: 34480 - DNA, 25 bp, synthetic construct
  misc_feature 1..25: note = Oligonucleotide
  source 1..25: mol_type = other DNA
caggaaagagatgactgcggggggc

SEQ ID NO: 34481 - DNA, 25 bp, synthetic construct
  misc_feature 1..25: note = Oligonucleotide
  source 1..25: mol_type = other DNA
gcacaggaaagagatgactgcgggg

SEQ ID NO: 34482 - DNA, 25 bp, synthetic construct
  misc_feature 1..25: note = Oligonucleotide
  source 1..25: mol_type = other DNA
tcagcacaggaaagagatgactgcg

SEQ ID NO: 34483 - DNA, 25 bp, synthetic construct
  misc_feature 1..25: note = Oligonucleotide
  source 1..25: mol_type = other DNA
ggctcagcacaggaaagagatgact

SEQ ID NO: 34484 - DNA, 25 bp, synthetic construct
  misc_feature 1..25: note = Oligonucleotide
  source 1..25: mol_type = other DNA
agtggctcagcacaggaaagagatg

SEQ ID NO: 34485 - DNA, 25 bp, synthetic construct
  misc_feature 1..25: note = Oligonucleotide
  source 1..25: mol_type = other DNA
ccgagtggctcagcacaggaaagag

SEQ ID NO: 34486 - DNA, 25 bp, synthetic construct
  misc_feature 1..25: note = Oligonucleotide
  source 1..25: mol_type = other DNA
cctccgagtggctcagcacaggaaa

SEQ ID NO: 34487 - DNA, 25 bp, synthetic construct
  misc_feature 1..25: note = Oligonucleotide
  source 1..25: mol_type = other DNA
caacctccgagtggctcagcacagg

SEQ ID NO: 34488 - DNA, 25 bp, synthetic construct
  misc_feature 1..25: note = Oligonucleotide
  source 1..25: mol_type = other DNA
cagcaacctccgagtggctcagcac

SEQ ID NO: 34489 - DNA, 25 bp, synthetic construct
  misc_feature 1..25: note = Oligonucleotide
  source 1..25: mol_type = other DNA
acacagcaacctccgagtggctcag

SEQ ID NO: 34490 - DNA, 25 bp, synthetic construct
  misc_feature 1..25: note = Oligonucleotide
  source 1..25: mol_type = other DNA
gccacacagcaacctccgagtggct

SEQ ID NO: 34491 - DNA, 25 bp, synthetic construct
  misc_feature 1..25: note = Oligonucleotide
  source 1..25: mol_type = other DNA
gctgccacacagcaacctccgagtg

SEQ ID NO: 34492 - DNA, 25 bp, synthetic construct
  misc_feature 1..25: note = Oligonucleotide
  source 1..25: mol_type = other DNA
gcggctgccacacagcaacctccga

SEQ ID NO: 34493 - DNA, 25 bp, synthetic construct
  misc_feature 1..25: note = Oligonucleotide
  source 1..25: mol_type = other DNA
ggggcggctgccacacagcaacctc

SEQ ID NO: 34494 - DNA, 25 bp, synthetic construct
  misc_feature 1..25: note = Oligonucleotide
  source 1..25: mol_type = other DNA
gtgggggcggctgccacacagcaac

SEQ ID NO: 34495 - DNA, 25 bp, synthetic construct
  misc_feature 1..25: note = Oligonucleotide
  source 1..25: mol_type = other DNA
cgggtgggggcggctgccacacagc

SEQ ID NO: 34496 - DNA, 25 bp, synthetic construct
  misc_feature 1..25: note = Oligonucleotide
  source 1..25: mol_type = other DNA
gttcgggtgggggcggctgccacac

SEQ ID NO: 34497 - DNA, 25 bp, synthetic construct
  misc_feature 1..25: note = Oligonucleotide
  source 1..25: mol_type = other DNA
taggttcgggtgggggcggctgcca

SEQ ID NO: 34498 - DNA, 25 bp, synthetic construct
  misc_feature 1..25: note = Oligonucleotide
  source 1..25: mol_type = other DNA
agctaggttcgggtgggggcggctg

SEQ ID NO: 34499 - DNA, 25 bp, synthetic construct
  misc_feature 1..25: note = Oligonucleotide
  source 1..25: mol_type = other DNA
accagctaggttcgggtgggggcgg

SEQ ID NO: 34500 - DNA, 25 bp, synthetic construct
  misc_feature 1..25: note = Oligonucleotide
  source 1..25: mol_type = other DNA
ttcaccagctaggttcgggtggggg

SEQ ID NO: 34501 - DNA, 25 bp, synthetic construct
  misc_feature 1..25: note = Oligonucleotide
  source 1..25: mol_type = other DNA
cgcttcaccagctaggttcgggtgg

SEQ ID NO: 34502 - DNA, 25 bp, synthetic construct
  misc_feature 1..25: note = Oligonucleotide
  source 1..25: mol_type = other DNA
aggcgcttcaccagctaggttcggg

SEQ ID NO: 34503 - DNA, 25 bp, synthetic construct
  misc_feature 1..25: note = Oligonucleotide
  source 1..25: mol_type = other DNA
ggaaggcgcttcaccagctaggttc

SEQ ID NO: 34504 - DNA, 25 bp, synthetic construct
  misc_feature 1..25: note = Oligonucleotide
  source 1..25: mol_type = other DNA
ttaggaaggcgcttcaccagctagg

SEQ ID NO: 34505 - DNA, 25 bp, synthetic construct
  misc_feature 1..25: note = Oligonucleotide
  source 1..25: mol_type = other DNA
caattaggaaggcgcttcaccagct

SEQ ID NO: 34506 - DNA, 25 bp, synthetic construct
  misc_feature 1..25: note = Oligonucleotide
  source 1..25: mol_type = other DNA
gggcaattaggaaggcgcttcacca

SEQ ID NO: 34507 - DNA, 25 bp, synthetic construct
  misc_feature 1..25: note = Oligonucleotide
  source 1..25: mol_type = other DNA
ggggggcaattaggaaggcgcttca

SEQ ID NO: 34508 - DNA, 25 bp, synthetic construct
  misc_feature 1..25: note = Oligonucleotide
  source 1..25: mol_type = other DNA
tgcggggggcaattaggaaggcgct

SEQ ID NO: 34509 - DNA, 25 bp, synthetic construct
  misc_feature 1..25: note = Oligonucleotide
  source 1..25: mol_type = other DNA
tgctgcggggggcaattaggaaggc

SEQ ID NO: 34510 - DNA, 25 bp, synthetic construct
  misc_feature 1..25: note = Oligonucleotide
  source 1..25: mol_type = other DNA
ctctgctgcggggggcaattaggaa

SEQ ID NO: 34511 - DNA, 25 bp, synthetic construct
  misc_feature 1..25: note = Oligonucleotide
  source 1..25: mol_type = other DNA
ggtctctgctgcggggggcaattag

SEQ ID NO: 34512 - DNA, 25 bp, synthetic construct
  misc_feature 1..25: note = Oligonucleotide
  source 1..25: mol_type = other DNA
gggggtctctgctgcggggggcaat

SEQ ID NO: 34513 - DNA, 25 bp, synthetic construct
  misc_feature 1..25: note = Oligonucleotide
  source 1..25: mol_type = other DNA
gatgggggtctctgctgcggggggc

SEQ ID NO: 34514 - DNA, 25 bp, synthetic construct
  misc_feature 1..25: note = Oligonucleotide
  source 1..25: mol_type = other DNA
ctcgatgggggtctctgctgcgggg

SEQ ID NO: 34515 - DNA, 25 bp, synthetic construct
  misc_feature 1..25: note = Oligonucleotide
  source 1..25: mol_type = other DNA
ctcctcgatgggggtctctgctgcg

SEQ ID NO: 34516 - DNA, 25 bp, synthetic construct
  misc_feature 1..25: note = Oligonucleotide
  source 1..25: mol_type = other DNA
gaactcctcgatgggggtctctgct

SEQ ID NO: 34517 - DNA, 25 bp, synthetic construct
  misc_feature 1..25: note = Oligonucleotide
  source 1..25: mol_type = other DNA
cgtgaactcctcgatgggggtctct

SEQ ID NO: 34518 - DNA, 25 bp, synthetic construct
  misc_feature 1..25: note = Oligonucleotide
  source 1..25: mol_type = other DNA
gggcgtgaactcctcgatgggggtc

SEQ ID NO: 34519 - DNA, 25 bp, synthetic construct
  misc_feature 1..25: note = Oligonucleotide
  source 1..25: mol_type = other DNA
cgtgggcgtgaactcctcgatgggg

SEQ ID NO: 34520 - DNA, 25 bp, synthetic construct
  misc_feature 1..25: note = Oligonucleotide
  source 1..25: mol_type = other DNA
tggcgtgggcgtgaactcctcgatg

SEQ ID NO: 34521 - DNA, 25 bp, synthetic construct
  misc_feature 1..25: note = Oligonucleotide
  source 1..25: mol_type = other DNA
ggctggcgtgggcgtgaactcctcg

SEQ ID NO: 34522 - DNA, 25 bp, synthetic construct
  misc_feature 1..25: note = Oligonucleotide
  source 1..25: mol_type = other DNA
gaaggctggcgtgggcgtgaactcc

SEQ ID NO: 34523 - DNA, 25 bp, synthetic construct
  misc_feature 1..25: note = Oligonucleotide
  source 1..25: mol_type = other DNA
cgggaaggctggcgtgggcgtgaac

SEQ ID NO: 34524 - DNA, 25 bp, synthetic construct
  misc_feature 1..25: note = Oligonucleotide
  source 1..25: mol_type = other DNA
cgccgggaaggctggcgtgggcgtg

SEQ ID NO: 34525 - DNA, 25 bp, synthetic construct
  misc_feature 1..25: note = Oligonucleotide
  source 1..25: mol_type = other DNA
cagcgccgggaaggctggcgtgggc

SEQ ID NO: 34526 - DNA, 25 bp, synthetic construct
  misc_feature 1..25: note = Oligonucleotide
  source 1..25: mol_type = other DNA
ctgcagcgccgggaaggctggcgtg

SEQ ID NO: 34527 - DNA, 25 bp, synthetic construct
  misc_feature 1..25: note = Oligonucleotide
  source 1..25: mol_type = other DNA
atactgcagcgccgggaaggctggc

SEQ ID NO: 34528 - DNA, 25 bp, synthetic construct
  misc_feature 1..25: note = Oligonucleotide
  source 1..25: mol_type = other DNA
gagatactgcagcgccgggaaggct

SEQ ID NO: 34529 - DNA, 25 bp, synthetic construct
  misc_feature 1..25: note = Oligonucleotide
  source 1..25: mol_type = other DNA
ctcgagatactgcagcgccgggaag

SEQ ID NO: 34530 - DNA, 25 bp, synthetic construct
  misc_feature 1..25: note = Oligonucleotide
  source 1..25: mol_type = other DNA
cgactcgagatactgcagcgccggg

SEQ ID NO: 34531 - DNA, 25 bp, synthetic construct
  misc_feature 1..25: note = Oligonucleotide
  source 1..25: mol_type = other DNA
caccgactcgagatactgcagcgcc

SEQ ID NO: 34532 - DNA, 25 bp, synthetic construct
  misc_feature 1..25: note = Oligonucleotide
  source 1..25: mol_type = other DNA
gtccaccgactcgagatactgcagc

SEQ ID NO: 34533 - DNA, 25 bp, synthetic construct
  misc_feature 1..25: note = Oligonucleotide
  source 1..25: mol_type = other DNA
cacgtccaccgactcgagatactgc

SEQ ID NO: 34534 - DNA, 25 bp, synthetic construct
  misc_feature 1..25: note = Oligonucleotide
  source 1..25: mol_type = other DNA
ctccacgtccaccgactcgagatac

SEQ ID NO: 34535 - DNA, 25 bp, synthetic construct
  misc_feature 1..25: note = Oligonucleotide
  source 1..25: mol_type = other DNA
accctccacgtccaccgactcgaga

SEQ ID NO: 34536 - DNA, 25 bp, synthetic construct
  misc_feature 1..25: note = Oligonucleotide
  source 1..25: mol_type = other DNA
cacaccctccacgtccaccgactcg

SEQ ID NO: 34537 - DNA, 25 bp, synthetic construct
  misc_feature 1..25: note = Oligonucleotide
  source 1..25: mol_type = other DNA
ggccacaccctccacgtccaccgac

SEQ ID NO: 34538 - DNA, 25 bp, synthetic construct
  misc_feature 1..25: note = Oligonucleotide
  source 1..25: mol_type = other DNA
ccaggccacaccctccacgtccacc

SEQ ID NO: 34539 - DNA, 25 bp, synthetic construct
  misc_feature 1..25: note = Oligonucleotide
  source 1..25: mol_type = other DNA
cctccaggccacaccctccacgtcc

SEQ ID NO: 34540 - DNA, 25 bp, synthetic construct
  misc_feature 1..25: note = Oligonucleotide
  source 1..25: mol_type = other DNA
ggccctccaggccacaccctccacg

SEQ ID NO: 34541 - DNA, 25 bp, synthetic construct
  misc_feature 1..25: note = Oligonucleotide
  source 1..25: mol_type = other DNA
cccggccctccaggccacaccctcc

SEQ ID NO: 34542 - DNA, 25 bp, synthetic construct
  misc_feature 1..25: note = Oligonucleotide
  source 1..25: mol_type = other DNA
cagcccggccctccaggccacaccc

SEQ ID NO: 34543 - DNA, 25 bp, synthetic construct
  misc_feature 1..25: note = Oligonucleotide
  source 1..25: mol_type = other DNA
gcgcagcccggccctccaggccaca

SEQ ID NO: 34544 - DNA, 25 bp, synthetic construct
  misc_feature 1..25: note = Oligonucleotide
  source 1..25: mol_type = other DNA
cgtgcgcagcccggccctccaggcc

SEQ ID NO: 34545 - DNA, 25 bp, synthetic construct
  misc_feature 1..25: note = Oligonucleotide
  source 1..25: mol_type = other DNA
tcccgtgcgcagcccggccctccag

SEQ ID NO: 34546 - DNA, 25 bp, synthetic construct
  misc_feature 1..25: note = Oligonucleotide
  source 1..25: mol_type = other DNA
gtctcccgtgcgcagcccggccctc

SEQ ID NO: 34547 - DNA, 25 bp, synthetic construct
  misc_feature 1..25: note = Oligonucleotide
  source 1..25: mol_type = other DNA
gaagtctcccgtgcgcagcccggcc

SEQ ID NO: 34548 - DNA, 25 bp, synthetic construct
  misc_feature 1..25: note = Oligonucleotide
  source 1..25: mol_type = other DNA
gaggaagtctcccgtgcgcagcccg

SEQ ID NO: 34549 - DNA, 25 bp, synthetic construct
  misc_feature 1..25: note = Oligonucleotide
  source 1..25: mol_type = other DNA
gatgaggaagtctcccgtgcgcagc

SEQ ID NO: 34550 - DNA, 25 bp, synthetic construct
  misc_feature 1..25: note = Oligonucleotide
  source 1..25: mol_type = other DNA
ctcgatgaggaagtctcccgtgcgc

SEQ ID NO: 34551 - DNA, 25 bp, synthetic construct
  misc_feature 1..25: note = Oligonucleotide
  source 1..25: mol_type = other DNA
cacctcgatgaggaagtctcccgtg

SEQ ID NO: 34552 - DNA, 25 bp, synthetic construct
  misc_feature 1..25: note = Oligonucleotide
  source 1..25: mol_type = other DNA
cctcacctcgatgaggaagtctccc

SEQ ID NO: 34553 - DNA, 25 bp, synthetic construct
  misc_feature 1..25: note = Oligonucleotide
  source 1..25: mol_type = other DNA
cgacctcacctcgatgaggaagtct

SEQ ID NO: 34554 - DNA, 25 bp, synthetic construct
  misc_feature 1..25: note = Oligonucleotide
  source 1..25: mol_type = other DNA
gaacgacctcacctcgatgaggaag

SEQ ID NO: 34555 - DNA, 25 bp, synthetic construct
  misc_feature 1..25: note = Oligonucleotide
  source 1..25: mol_type = other DNA
ccagaacgacctcacctcgatgagg

SEQ ID NO: 34556 - DNA, 25 bp, synthetic construct
  misc_feature 1..25: note = Oligonucleotide
  source 1..25: mol_type = other DNA
cggccagaacgacctcacctcgatg

SEQ ID NO: 34557 - DNA, 25 bp, synthetic construct
  misc_feature 1..25: note = Oligonucleotide
  source 1..25: mol_type = other DNA
caccggccagaacgacctcacctcg

SEQ ID NO: 34558 - DNA, 25 bp, synthetic construct
  misc_feature 1..25: note = Oligonucleotide
  source 1..25: mol_type = other DNA
cagcaccggccagaacgacctcacc

SEQ ID NO: 34559 - DNA, 25 bp, synthetic construct
  misc_feature 1..25: note = Oligonucleotide
  source 1..25: mol_type = other DNA
gggcagcaccggccagaacgacctc

SEQ ID NO: 34560 - DNA, 25 bp, synthetic construct
  misc_feature 1..25: note = Oligonucleotide
  source 1..25: mol_type = other DNA
actgggcagcaccggccagaacgac

SEQ ID NO: 34561 - DNA, 25 bp, synthetic construct
  misc_feature 1..25: note = Oligonucleotide
  source 1..25: mol_type = other DNA
cccactgggcagcaccggccagaac

SEQ ID NO: 34562 - DNA, 25 bp, synthetic construct
  misc_feature 1..25: note = Oligonucleotide
  source 1..25: mol_type = other DNA
catcccactgggcagcaccggccag

SEQ ID NO: 34563 - DNA, 25 bp, synthetic construct
  misc_feature 1..25: note = Oligonucleotide
  source 1..25: mol_type = other DNA
cagcatcccactgggcagcaccggc

SEQ ID NO: 34564 - DNA, 25 bp, synthetic construct
  misc_feature 1..25: note = Oligonucleotide
  source 1..25: mol_type = other DNA
gctcagcatcccactgggcagcacc

SEQ ID NO: 34565 - DNA, 25 bp, synthetic construct
  misc_feature 1..25: note = Oligonucleotide
  source 1..25: mol_type = other DNA
agggctcagcatcccactgggcagc

SEQ ID NO: 34566 - DNA, 25 bp, synthetic construct
  misc_feature 1..25: note = Oligonucleotide
  source 1..25: mol_type = other DNA
ctcagggctcagcatcccactgggc

SEQ ID NO: 34567 - DNA, 25 bp, synthetic construct
  misc_feature 1..25: note = Oligonucleotide
  source 1..25: mol_type = other DNA
gggctcagggctcagcatcccactg

SEQ ID NO: 34568 - DNA, 25 bp, synthetic construct
  misc_feature 1..25: note = Oligonucleotide
  source 1..25: mol_type = other DNA
acagggctcagggctcagcatccca

SEQ ID NO: 34569 - DNA, 25 bp, synthetic construct
  misc_feature 1..25: note = Oligonucleotide
  source 1..25: mol_type = other DNA
accacagggctcagggctcagcatc

SEQ ID NO: 34570 - DNA, 25 bp, synthetic construct
  misc_feature 1..25: note = Oligonucleotide
  source 1..25: mol_type = other DNA
tccaccacagggctcagggctcagc

SEQ ID NO: 34571 - DNA, 25 bp, synthetic construct
  misc_feature 1..25: note = Oligonucleotide
  source 1..25: mol_type = other DNA
acgtccaccacagggctcagggctc

SEQ ID NO: 34572 - DNA, 25 bp, synthetic construct
  misc_feature 1..25: note = Oligonucleotide
  source 1..25: mol_type = other DNA
ggcacgtccaccacagggctcaggg

SEQ ID NO: 34573 - DNA, 25 bp, synthetic construct
  misc_feature 1..25: note = Oligonucleotide
  source 1..25: mol_type = other DNA
ccaggcacgtccaccacagggctca

SEQ ID NO: 34574 - DNA, 25 bp, synthetic construct
  misc_feature 1..25: note = Oligonucleotide
  source 1..25: mol_type = other DNA
gccccaggcacgtccaccacagggc

SEQ ID NO: 34575 - DNA, 25 bp, synthetic construct
  misc_feature 1..25: note = Oligonucleotide
  source 1..25: mol_type = other DNA
gacgccccaggcacgtccaccacag

SEQ ID NO: 34576 - DNA, 25 bp, synthetic construct
  misc_feature 1..25: note = Oligonucleotide
  source 1..25: mol_type = other DNA
ggggacgccccaggcacgtccacca

SEQ ID NO: 34577 - DNA, 25 bp, synthetic construct
  misc_feature 1..25: note = Oligonucleotide
  source 1..25: mol_type = other DNA
ggtggggacgccccaggcacgtcca

SEQ ID NO: 34578 - DNA, 25 bp, synthetic construct
  misc_feature 1..25: note = Oligonucleotide
  source 1..25: mol_type = other DNA
ctgggtggggacgccccaggcacgt

SEQ ID NO: 34579 - DNA, 25 bp, synthetic construct
  misc_feature 1..25: note = Oligonucleotide
  source 1..25: mol_type = other DNA
cagctgggtggggacgccccaggca

SEQ ID NO: 34580 - DNA, 25 bp, synthetic construct
  misc_feature 1..25: note = Oligonucleotide
  source 1..25: mol_type = other DNA
aggcagctgggtggggacgccccag

SEQ ID NO: 34581 - DNA, 25 bp, synthetic construct
  misc_feature 1..25: note = Oligonucleotide
  source 1..25: mol_type = other DNA
gacaggcagctgggtggggacgccc

SEQ ID NO: 34582 - DNA, 25 bp, synthetic construct
  misc_feature 1..25: note = Oligonucleotide
  source 1..25: mol_type = other DNA
atagacaggcagctgggtggggacg

SEQ ID NO: 34583 - DNA, 25 bp, synthetic construct
  misc_feature 1..25: note = Oligonucleotide
  source 1..25: mol_type = other DNA
gggatagacaggcagctgggtgggg

SEQ ID NO: 34584 - DNA, 25 bp, synthetic construct
  misc_feature 1..25: note = Oligonucleotide
  source 1..25: mol_type = other DNA
cctgggatagacaggcagctgggtg

SEQ ID NO: 34585 - DNA, 25 bp, synthetic construct
  misc_feature 1..25: note = Oligonucleotide
  source 1..25: mol_type = other DNA
tcacctgggatagacaggcagctgg

SEQ ID NO: 34586 - DNA, 25 bp, synthetic construct
  misc_feature 1..25: note = Oligonucleotide
  source 1..25: mol_type = other DNA
cgttcacctgggatagacaggcagc

SEQ ID NO: 34587 - DNA, 25 bp, synthetic construct
  misc_feature 1..25: note = Oligonucleotide
  source 1..25: mol_type = other DNA
ccccgttcacctgggatagacaggc

SEQ ID NO: 34588 - DNA, 25 bp, synthetic construct
  misc_feature 1..25: note = Oligonucleotide
  source 1..25: mol_type = other DNA
tcaccccgttcacctgggatagaca

SEQ ID NO: 34589 - DNA, 25 bp, synthetic construct
  misc_feature 1..25: note = Oligonucleotide
  source 1..25: mol_type = other DNA
cgttcaccccgttcacctgggatag

SEQ ID NO: 34590 - DNA, 25 bp, synthetic construct
  misc_feature 1..25: note = Oligonucleotide
  source 1..25: mol_type = other DNA
ccacgttcaccccgttcacctggga

SEQ ID NO: 34591 - DNA, 25 bp, synthetic construct
  misc_feature 1..25: note = Oligonucleotide
  source 1..25: mol_type = other DNA
tcaccacgttcaccccgttcacctg

SEQ ID NO: 34592 - DNA, 25 bp, synthetic construct
  misc_feature 1..25: note = Oligonucleotide
  source 1..25: mol_type = other DNA
ccttcaccacgttcaccccgttcac

SEQ ID NO: 34593 - DNA, 25 bp, synthetic construct
  misc_feature 1..25: note = Oligonucleotide
  source 1..25: mol_type = other DNA
cgaccttcaccacgttcaccccgtt

SEQ ID NO: 34594 - DNA, 25 bp, synthetic construct
  misc_feature 1..25: note = Oligonucleotide
  source 1..25: mol_type = other DNA
gtccgaccttcaccacgttcacccc

SEQ ID NO: 34595 - DNA, 25 bp, synthetic construct
  misc_feature 1..25: note = Oligonucleotide
  source 1..25: mol_type = other DNA
tgtgtccgaccttcaccacgttcac

SEQ ID NO: 34596 - DNA, 25 bp, synthetic construct
  misc_feature 1..25: note = Oligonucleotide
  source 1..25: mol_type = other DNA
gcttgtgtccgaccttcaccacgtt

SEQ ID NO: 34597 - DNA, 25 bp, synthetic construct
  misc_feature 1..25: note = Oligonucleotide
  source 1..25: mol_type = other DNA
cctgcttgtgtccgaccttcaccac

SEQ ID NO: 34598 - DNA, 25 bp, synthetic construct
  misc_feature 1..25: note = Oligonucleotide
  source 1..25: mol_type = other DNA
ccacctgcttgtgtccgaccttcac

SEQ ID NO: 34599 - DNA, 25 bp, synthetic construct
  misc_feature 1..25: note = Oligonucleotide
  source 1..25: mol_type = other DNA
ccaccacctgcttgtgtccgacctt

SEQ ID NO: 34600 - DNA, 25 bp, synthetic construct
  misc_feature 1..25: note = Oligonucleotide
  source 1..25: mol_type = other DNA
gagccaccacctgcttgtgtccgac

SEQ ID NO: 34601 - DNA, 25 bp, synthetic construct
  misc_feature 1..25: note = Oligonucleotide
  source 1..25: mol_type = other DNA
tcagagccaccacctgcttgtgtcc

SEQ ID NO: 34602 - DNA, 25 bp, synthetic construct
  misc_feature 1..25: note = Oligonucleotide
  source 1..25: mol_type = other DNA
gaatcagagccaccacctgcttgtg

SEQ ID NO: 34603 - DNA, 25 bp, synthetic construct
  misc_feature 1..25: note = Oligonucleotide
  source 1..25: mol_type = other DNA
ggcgaatcagagccaccacctgctt

SEQ ID NO: 34604 - DNA, 25 bp, synthetic construct
  misc_feature 1..25: note = Oligonucleotide
  source 1..25: mol_type = other DNA
cctggcgaatcagagccaccacctg

SEQ ID NO: 34605 - DNA, 25 bp, synthetic construct
  misc_feature 1..25: note = Oligonucleotide
  source 1..25: mol_type = other DNA
caccctggcgaatcagagccaccac

SEQ ID NO: 34606 - DNA, 25 bp, synthetic construct
  misc_feature 1..25: note = Oligonucleotide
  source 1..25: mol_type = other DNA
tgccaccctggcgaatcagagccac

SEQ ID NO: 34607 - DNA, 25 bp, synthetic construct
  misc_feature 1..25: note = Oligonucleotide
  source 1..25: mol_type = other DNA
ggttgccaccctggcgaatcagagc

SEQ ID NO: 34608 - DNA, 25 bp, synthetic construct
  misc_feature 1..25: note = Oligonucleotide
  source 1..25: mol_type = other DNA
ggcggttgccaccctggcgaatcag

SEQ ID NO: 34609 - DNA, 25 bp, synthetic construct
  misc_feature 1..25: note = Oligonucleotide
  source 1..25: mol_type = other DNA
cgaggcggttgccaccctggcgaat

SEQ ID NO: 34610 - DNA, 25 bp, synthetic construct
  misc_feature 1..25: note = Oligonucleotide
  source 1..25: mol_type = other DNA
tgacgaggcggttgccaccctggcg

SEQ ID NO: 34611 - DNA, 25 bp, synthetic construct
  misc_feature 1..25: note = Oligonucleotide
  source 1..25: mol_type = other DNA
tcatgacgaggcggttgccaccctg

SEQ ID NO: 34612 - DNA, 25 bp, synthetic construct
  misc_feature 1..25: note = Oligonucleotide
  source 1..25: mol_type = other DNA
ccttcatgacgaggcggttgccacc

SEQ ID NO: 34613 - DNA, 25 bp, synthetic construct
  misc_feature 1..25: note = Oligonucleotide
  source 1..25: mol_type = other DNA
caaccttcatgacgaggcggttgcc

SEQ ID NO: 34614 - DNA, 25 bp, synthetic construct
  misc_feature 1..25: note = Oligonucleotide
  source 1..25: mol_type = other DNA
acacaaccttcatgacgaggcggtt

SEQ ID NO: 34615 - DNA, 25 bp, synthetic construct
  misc_feature 1..25: note = Oligonucleotide
  source 1..25: mol_type = other DNA
cagacacaaccttcatgacgaggcg

SEQ ID NO: 34616 - DNA, 25 bp, synthetic construct
  misc_feature 1..25: note = Oligonucleotide
  source 1..25: mol_type = other DNA
tcacagacacaaccttcatgacgag

SEQ ID NO: 34617 - DNA, 25 bp, synthetic construct
  misc_feature 1..25: note = Oligonucleotide
  source 1..25: mol_type = other DNA
ttgtcacagacacaaccttcatgac

SEQ ID NO: 34618 - DNA, 25 bp, synthetic construct
  misc_feature 1..25: note = Oligonucleotide
  source 1..25: mol_type = other DNA
tccttgtcacagacacaaccttcat

SEQ ID NO: 34619 - DNA, 25 bp, synthetic construct
  misc_feature 1..25: note = Oligonucleotide
  source 1..25: mol_type = other DNA
gcttccttgtcacagacacaacctt

SEQ ID NO: 34620 - DNA, 25 bp, synthetic construct
  misc_feature 1..25: note = Oligonucleotide
  source 1..25: mol_type = other DNA
ctggcttccttgtcacagacacaac

SEQ ID NO: 34621 - DNA, 25 bp, synthetic construct
  misc_feature 1..25: note = Oligonucleotide
  source 1..25: mol_type = other DNA
cttctggcttccttgtcacagacac

SEQ ID NO: 34622 - DNA, 25 bp, synthetic construct
  misc_feature 1..25: note = Oligonucleotide
  source 1..25: mol_type = other DNA
cctcttctggcttccttgtcacaga

SEQ ID NO: 34623 - DNA, 25 bp, synthetic construct
  misc_feature 1..25: note = Oligonucleotide
  source 1..25: mol_type = other DNA
cgtcctcttctggcttccttgtcac

SEQ ID NO: 34624 - DNA, 25 bp, synthetic construct
  misc_feature 1..25: note = Oligonucleotide
  source 1..25: mol_type = other DNA
ccccgtcctcttctggcttccttgt

SEQ ID NO: 34625 - DNA, 25 bp, synthetic construct
  misc_feature 1..25: note = Oligonucleotide
  source 1..25: mol_type = other DNA
gagccccgtcctcttctggcttcct

SEQ ID NO: 34626 - DNA, 25 bp, synthetic construct
  misc_feature 1..25: note = Oligonucleotide
  source 1..25: mol_type = other DNA
gccgagccccgtcctcttctggctt

SEQ ID NO: 34627 - DNA, 25 bp, synthetic construct
  misc_feature 1..25: note = Oligonucleotide
  source 1..25: mol_type = other DNA
tgcgccgagccccgtcctcttctgg

SEQ ID NO: 34628 - DNA, 25 bp, synthetic construct
  misc_feature 1..25: note = Oligonucleotide
  source 1..25: mol_type = other DNA
ctctgcgccgagccccgtcctcttc

SEQ ID NO: 34629 - DNA, 25 bp, synthetic construct
  misc_feature 1..25: note = Oligonucleotide
  source 1..25: mol_type = other DNA
cacctctgcgccgagccccgtcctc

SEQ ID NO: 34630 - DNA, 25 bp, synthetic construct
  misc_feature 1..25: note = Oligonucleotide
  source 1..25: mol_type = other DNA
cctcacctctgcgccgagccccgtc

SEQ ID NO: 34631 - DNA, 25 bp, synthetic construct
  misc_feature 1..25: note = Oligonucleotide
  source 1..25: mol_type = other DNA
acccctcacctctgcgccgagcccc

SEQ ID NO: 34632 - DNA, 25 bp, synthetic construct
  misc_feature 1..25: note = Oligonucleotide
  source 1..25: mol_type = other DNA
gtgacccctcacctctgcgccgagc

SEQ ID NO: 34633 - DNA, 25 bp, synthetic construct
  misc_feature 1..25: note = Oligonucleotide
  source 1..25: mol_type = other DNA
agcgtgacccctcacctctgcgccg

SEQ ID NO: 34634 - DNA, 25 bp, synthetic construct
  misc_feature 1..25: note = Oligonucleotide
  source 1..25: mol_type = other DNA
tgaagcgtgacccctcacctctgcg

SEQ ID NO: 34635 - DNA, 25 bp, synthetic construct
  misc_feature 1..25: note = Oligonucleotide
  source 1..25: mol_type = other DNA
gcctgaagcgtgacccctcacctct

SEQ ID NO: 34636 - DNA, 25 bp, synthetic construct
  misc_feature 1..25: note = Oligonucleotide
  source 1..25: mol_type = other DNA
gaggcctgaagcgtgacccctcacc

SEQ ID NO: 34637 - DNA, 25 bp, synthetic construct
  misc_feature 1..25: note = Oligonucleotide
  source 1..25: mol_type = other DNA
acagaggcctgaagcgtgacccctc

SEQ ID NO: 34638 - DNA, 25 bp, synthetic construct
  misc_feature 1..25: note = Oligonucleotide
  source 1..25: mol_type = other DNA
ggcacagaggcctgaagcgtgaccc

SEQ ID NO: 34639 - DNA, 25 bp, synthetic construct
  misc_feature 1..25: note = Oligonucleotide
  source 1..25: mol_type = other DNA
ttgggcacagaggcctgaagcgtga

SEQ ID NO: 34640 - DNA, 25 bp, synthetic construct
  misc_feature 1..25: note = Oligonucleotide
  source 1..25: mol_type = other DNA
agtttgggcacagaggcctgaagcg

SEQ ID NO: 34641 - DNA, 25 bp, synthetic construct
  misc_feature 1..25: note = Oligonucleotide
  source 1..25: mol_type = other DNA
gaaagtttgggcacagaggcctgaa

SEQ ID NO: 34642 - DNA, 25 bp, synthetic construct
  misc_feature 1..25: note = Oligonucleotide
  source 1..25: mol_type = other DNA
ggggaaagtttgggcacagaggcct

SEQ ID NO: 34643 - DNA, 25 bp, synthetic construct
  misc_feature 1..25: note = Oligonucleotide
  source 1..25: mol_type = other DNA
tcaggggaaagtttgggcacagagg

SEQ ID NO: 34644 - DNA, 25 bp, synthetic construct
  misc_feature 1..25: note = Oligonucleotide
  source 1..25: mol_type = other DNA
aggtcaggggaaagtttgggcacag

SEQ ID NO: 34645 - DNA, 25 bp, synthetic construct
  misc_feature 1..25: note = Oligonucleotide
  source 1..25: mol_type = other DNA
ctaaggtcaggggaaagtttgggca

SEQ ID NO: 34646 - DNA, 25 bp, synthetic construct
  misc_feature 1..25: note = Oligonucleotide
  source 1..25: mol_type = other DNA
ggtctaaggtcaggggaaagtttgg

SEQ ID NO: 34647 - DNA, 25 bp, synthetic construct
  misc_feature 1..25: note = Oligonucleotide
  source 1..25: mol_type = other DNA
aaaggtctaaggtcaggggaaagtt

SEQ ID NO: 34648 - DNA, 25 bp, synthetic construct
  misc_feature 1..25: note = Oligonucleotide
  source 1..25: mol_type = other DNA
gtcaaaggtctaaggtcaggggaaa

SEQ ID NO: 34649 - DNA, 25 bp, synthetic construct
  misc_feature 1..25: note = Oligonucleotide
  source 1..25: mol_type = other DNA
gaagtcaaaggtctaaggtcagggg

SEQ ID NO: 34650 - DNA, 25 bp, synthetic construct
  misc_feature 1..25: note = Oligonucleotide
  source 1..25: mol_type = other DNA
cctgaagtcaaaggtctaaggtcag

SEQ ID NO: 34651 - DNA, 25 bp, synthetic construct
  misc_feature 1..25: note = Oligonucleotide
  source 1..25: mol_type = other DNA
gggcctgaagtcaaaggtctaaggt

SEQ ID NO: 34652 - DNA, 25 bp, synthetic construct
  misc_feature 1..25: note = Oligonucleotide
  source 1..25: mol_type = other DNA
tgtgggcctgaagtcaaaggtctaa

SEQ ID NO: 34653 - DNA, 25 bp, synthetic construct
  misc_feature 1..25: note = Oligonucleotide
  source 1..25: mol_type = other DNA
gaatgtgggcctgaagtcaaaggtc

SEQ ID NO: 34654 - DNA, 25 bp, synthetic construct
  misc_feature 1..25: note = Oligonucleotide
  source 1..25: mol_type = other DNA
gaggaatgtgggcctgaagtcaaag

SEQ ID NO: 34655 - DNA, 25 bp, synthetic construct
  misc_feature 1..25: note = Oligonucleotide
  source 1..25: mol_type = other DNA
gaagaggaatgtgggcctgaagtca

SEQ ID NO: 34656 - DNA, 25 bp, synthetic construct
  misc_feature 1..25: note = Oligonucleotide
  source 1..25: mol_type = other DNA
tgggaagaggaatgtgggcctgaag

SEQ ID NO: 34657 - DNA, 25 bp, synthetic construct
  misc_feature 1..25: note = Oligonucleotide
  source 1..25: mol_type = other DNA
ggatgggaagaggaatgtgggcctg

SEQ ID NO: 34658 - DNA, 25 bp, synthetic construct
  misc_feature 1..25: note = Oligonucleotide
  source 1..25: mol_type = other DNA
cagggatgggaagaggaatgtgggc

SEQ ID NO: 34659 - DNA, 25 bp, synthetic construct
  misc_feature 1..25: note = Oligonucleotide
  source 1..25: mol_type = other DNA
ggtcagggatgggaagaggaatgtg

SEQ ID NO: 34660 - DNA, 25 bp, synthetic construct
  misc_feature 1..25: note = Oligonucleotide
  source 1..25: mol_type = other DNA
gggggtcagggatgggaagaggaat

SEQ ID NO: 34661 - DNA, 25 bp, synthetic construct
  misc_feature 1..25: note = Oligonucleotide
  source 1..25: mol_type = other DNA
gttgggggtcagggatgggaagagg

SEQ ID NO: 34662 - DNA, 25 bp, synthetic construct
  misc_feature 1..25: note = Oligonucleotide
  source 1..25: mol_type = other DNA
gcagttgggggtcagggatgggaag

SEQ ID NO: 34663 - DNA, 25 bp, synthetic construct
  misc_feature 1..25: note = Oligonucleotide
  source 1..25: mol_type = other DNA
tcagcagttgggggtcagggatggg

SEQ ID NO: 34664 - DNA, 25 bp, synthetic construct
  misc_feature 1..25: note = Oligonucleotide
  source 1..25: mol_type = other DNA
atgtcagcagttgggggtcagggat

SEQ ID NO: 34665 - DNA, 25 bp, synthetic construct
  misc_feature 1..25: note = Oligonucleotide
  source 1..25: mol_type = other DNA
ctgatgtcagcagttgggggtcagg

SEQ ID NO: 34666 - DNA, 25 bp, synthetic construct
  misc_feature 1..25: note = Oligonucleotide
  source 1..25: mol_type = other DNA
aatctgatgtcagcagttgggggtc

SEQ ID NO: 34667 - DNA, 25 bp, synthetic construct
  misc_feature 1..25: note = Oligonucleotide
  source 1..25: mol_type = other DNA
aggaatctgatgtcagcagttgggg

SEQ ID NO: 34668 - DNA, 25 bp, synthetic construct
  misc_feature 1..25: note = Oligonucleotide
  source 1..25: mol_type = other DNA
ttcaggaatctgatgtcagcagttg

SEQ ID NO: 34669 - DNA, 25 bp, synthetic construct
  misc_feature 1..25: note = Oligonucleotide
  source 1..25: mol_type = other DNA
aggttcaggaatctgatgtcagcag

SEQ ID NO: 34670 - DNA, 25 bp, synthetic construct
  misc_feature 1..25: note = Oligonucleotide
  source 1..25: mol_type = other DNA
ttgaggttcaggaatctgatgtcag

SEQ ID NO: 34671 - DNA, 25 bp, synthetic construct
  misc_feature 1..25: note = Oligonucleotide
  source 1..25: mol_type = other DNA
tcattgaggttcaggaatctgatgt

SEQ ID NO: 34672 - DNA, 25 bp, synthetic construct
  misc_feature 1..25: note = Oligonucleotide
  source 1..25: mol_type = other DNA
ggttcattgaggttcaggaatctga

SEQ ID NO: 34673 - DNA, 25 bp, synthetic construct
  misc_feature 1..25: note = Oligonucleotide
  source 1..25: mol_type = other DNA
ggtggttcattgaggttcaggaatc

SEQ ID NO: 34674 - DNA, 25 bp, synthetic construct
  misc_feature 1..25: note = Oligonucleotide
  source 1..25: mol_type = other DNA
gtgggtggttcattgaggttcagga

SEQ ID NO: 34675 - DNA, 25 bp, synthetic construct
  misc_feature 1..25: note = Oligonucleotide
  source 1..25: mol_type = other DNA
cgtgtgggtggttcattgaggttca

SEQ ID NO: 34676 - DNA, 25 bp, synthetic construct
  misc_feature 1..25: note = Oligonucleotide
  source 1..25: mol_type = other DNA
acacgtgtgggtggttcattgaggt

SEQ ID NO: 34677 - DNA, 25 bp, synthetic construct
  misc_feature 1..25: note = Oligonucleotide
  source 1..25: mol_type = other DNA
cccacacgtgtgggtggttcattga

SEQ ID NO: 34678 - DNA, 25 bp, synthetic construct
  misc_feature 1..25: note = Oligonucleotide
  source 1..25: mol_type = other DNA
cagcccacacgtgtgggtggttcat

SEQ ID NO: 34679 - DNA, 25 bp, synthetic construct
  misc_feature 1..25: note = Oligonucleotide
  source 1..25: mol_type = other DNA
tcccagcccacacgtgtgggtggtt

SEQ ID NO: 34680 - DNA, 25 bp, synthetic construct
  misc_feature 1..25: note = Oligonucleotide
  source 1..25: mol_type = other DNA
gggtcccagcccacacgtgtgggtg

SEQ ID NO: 34681 - DNA, 25 bp, synthetic construct
  misc_feature 1..25: note = Oligonucleotide
  source 1..25: mol_type = other DNA
gaggggtcccagcccacacgtgtgg

SEQ ID NO: 34682 - DNA, 25 bp, synthetic construct
  misc_feature 1..25: note = Oligonucleotide
  source 1..25: mol_type = other DNA
cgggaggggtcccagcccacacgtg

SEQ ID NO: 34683 - DNA, 25 bp, synthetic construct
  misc_feature 1..25: note = Oligonucleotide
  source 1..25: mol_type = other DNA
gatcgggaggggtcccagcccacac

SEQ ID NO: 34684 - DNA, 25 bp, synthetic construct
  misc_feature 1..25: note = Oligonucleotide
  source 1..25: mol_type = other DNA
agggatcgggaggggtcccagccca

SEQ ID NO: 34685 - DNA, 25 bp, synthetic construct
  misc_feature 1..25: note = Oligonucleotide
  source 1..25: mol_type = other DNA
accagggatcgggaggggtcccagc

SEQ ID NO: 34686 - DNA, 25 bp, synthetic construct
  misc_feature 1..25: note = Oligonucleotide
  source 1..25: mol_type = other DNA
agcaccagggatcgggaggggtccc

SEQ ID NO: 34687 - DNA, 25 bp, synthetic construct
  misc_feature 1..25: note = Oligonucleotide
  source 1..25: mol_type = other DNA
tctagcaccagggatcgggaggggt

SEQ ID NO: 34688 - DNA, 25 bp, synthetic construct
  misc_feature 1..25: note = Oligonucleotide
  source 1..25: mol_type = other DNA
cagtctagcaccagggatcgggagg

SEQ ID NO: 34689 - DNA, 25 bp, synthetic construct
  misc_feature 1..25: note = Oligonucleotide
  source 1..25: mol_type = other DNA
tggcagtctagcaccagggatcggg

SEQ ID NO: 34690 - DNA, 25 bp, synthetic construct
  misc_feature 1..25: note = Oligonucleotide
  source 1..25: mol_type = other DNA
gactggcagtctagcaccagggatc

SEQ ID NO: 34691 - DNA, 25 bp, synthetic construct
  misc_feature 1..25: note = Oligonucleotide
  source 1..25: mol_type = other DNA
caggactggcagtctagcaccaggg

SEQ ID NO: 34692 - DNA, 25 bp, synthetic construct
  misc_feature 1..25: note = Oligonucleotide
  source 1..25: mol_type = other DNA
ggacaggactggcagtctagcacca

SEQ ID NO: 34693 - DNA, 25 bp, synthetic construct
  misc_feature 1..25: note = Oligonucleotide
  source 1..25: mol_type = other DNA
aggggacaggactggcagtctagca

SEQ ID NO: 34694 - DNA, 25 bp, synthetic construct
  misc_feature 1..25: note = Oligonucleotide
  source 1..25: mol_type = other DNA
gccaggggacaggactggcagtcta

SEQ ID NO: 34695 - DNA, 25 bp, synthetic construct
  misc_feature 1..25: note = Oligonucleotide
  source 1..25: mol_type = other DNA
caggccaggggacaggactggcagt

SEQ ID NO: 34696 - DNA, 25 bp, synthetic construct
  misc_feature 1..25: note = Oligonucleotide
  source 1..25: mol_type = other DNA
cctcaggccaggggacaggactggc

SEQ ID NO: 34697 - DNA, 25 bp, synthetic construct
  misc_feature 1..25: note = Oligonucleotide
  source 1..25: mol_type = other DNA
aggcctcaggccaggggacaggact

SEQ ID NO: 34698 - DNA, 25 bp, synthetic construct
  misc_feature 1..25: note = Oligonucleotide
  source 1..25: mol_type = other DNA
caaaggcctcaggccaggggacagg

SEQ ID NO: 34699 - DNA, 25 bp, synthetic construct
  misc_feature 1..25: note = Oligonucleotide
  source 1..25: mol_type = other DNA
ggtcaaaggcctcaggccaggggac

SEQ ID NO: 34700 - DNA, 25 bp, synthetic construct
  misc_feature 1..25: note = Oligonucleotide
  source 1..25: mol_type = other DNA
aggggtcaaaggcctcaggccaggg

SEQ ID NO: 34701 - DNA, 25 bp, synthetic construct
  misc_feature 1..25: note = Oligonucleotide
  source 1..25: mol_type = other DNA
gtcaggggtcaaaggcctcaggcca

SEQ ID NO: 34702 - DNA, 25 bp, synthetic construct
  misc_feature 1..25: note = Oligonucleotide
  source 1..25: mol_type = other DNA
ggggtcaggggtcaaaggcctcagg

SEQ ID NO: 34703 - DNA, 25 bp, synthetic construct
  misc_feature 1..25: note = Oligonucleotide
  source 1..25: mol_type = other DNA
tcaggggtcaggggtcaaaggcctc

SEQ ID NO: 34704 - DNA, 25 bp, synthetic construct
  misc_feature 1..25: note = Oligonucleotide
  source 1..25: mol_type = other DNA
aggtcaggggtcaggggtcaaaggc

SEQ ID NO: 34705 - DNA, 25 bp, synthetic construct
  misc_feature 1..25: note = Oligonucleotide
  source 1..25: mol_type = other DNA
ctgaggtcaggggtcaggggtcaaa

SEQ ID NO: 34706 - DNA, 25 bp, synthetic construct
  misc_feature 1..25: note = Oligonucleotide
  source 1..25: mol_type = other DNA
agcctgaggtcaggggtcaggggtc

SEQ ID NO: 34707 - DNA, 25 bp, synthetic construct
  misc_feature 1..25: note = Oligonucleotide
  source 1..25: mol_type = other DNA
ggcagcctgaggtcaggggtcaggg

SEQ ID NO: 34708 - DNA, 25 bp, synthetic construct
  misc_feature 1..25: note = Oligonucleotide
  source 1..25: mol_type = other DNA
aggggcagcctgaggtcaggggtca

SEQ ID NO: 34709 - DNA, 25 bp, synthetic construct
  misc_feature 1..25: note = Oligonucleotide
  source 1..25: mol_type = other DNA
aggaggggcagcctgaggtcagggg

SEQ ID NO: 34710 - DNA, 25 bp, synthetic construct
  misc_feature 1..25: note = Oligonucleotide
  source 1..25: mol_type = other DNA
ctgaggaggggcagcctgaggtcag

SEQ ID NO: 34711 - DNA, 25 bp, synthetic construct
  misc_feature 1..25: note = Oligonucleotide
  source 1..25: mol_type = other DNA
gatctgaggaggggcagcctgaggt

SEQ ID NO: 34712 - DNA, 25 bp, synthetic construct
  misc_feature 1..25: note = Oligonucleotide
  source 1..25: mol_type = other DNA
agggatctgaggaggggcagcctga

SEQ ID NO: 34713 - DNA, 25 bp, synthetic construct
  misc_feature 1..25: note = Oligonucleotide
  source 1..25: mol_type = other DNA
ggcagggatctgaggaggggcagcc

SEQ ID NO: 34714 - DNA, 25 bp, synthetic construct
  misc_feature 1..25: note = Oligonucleotide
  source 1..25: mol_type = other DNA
gggggcagggatctgaggaggggca

SEQ ID NO: 34715 - DNA, 25 bp, synthetic construct
  misc_feature 1..25: note = Oligonucleotide
  source 1..25: mol_type = other DNA
ggagggggcagggatctgaggaggg

SEQ ID NO: 34716 - DNA, 25 bp, synthetic construct
  misc_feature 1..25: note = Oligonucleotide
  source 1..25: mol_type = other DNA
gaaggagggggcagggatctgagga

SEQ ID NO: 34717 - DNA, 25 bp, synthetic construct
  misc_feature 1..25: note = Oligonucleotide
  source 1..25: mol_type = other DNA
cgggaaggagggggcagggatctga

SEQ ID NO: 34718 - DNA, 25 bp, synthetic construct
  misc_feature 1..25: note = Oligonucleotide
  source 1..25: mol_type = other DNA
cgccgggaaggagggggcagggatc

SEQ ID NO: 34719 - DNA, 25 bp, synthetic construct
  misc_feature 1..25: note = Oligonucleotide
  source 1..25: mol_type = other DNA
gaacgccgggaaggagggggcaggg

SEQ ID NO: 34720 - DNA, 25 bp, synthetic construct
  misc_feature 1..25: note = Oligonucleotide
  source 1..25: mol_type = other DNA
ggggaacgccgggaaggagggggca

SEQ ID NO: 34721 - DNA, 25 bp, synthetic construct
  misc_feature 1..25: note = Oligonucleotide
  source 1..25: mol_type = other DNA
ctgggggaacgccgggaaggagggg

SEQ ID NO: 34722 - DNA, 25 bp, synthetic construct
  misc_feature 1..25: note = Oligonucleotide
  source 1..25: mol_type = other DNA
gggctgggggaacgccgggaaggag

SEQ ID NO: 34723 - DNA, 25 bp, synthetic construct
  misc_feature 1..25: note = Oligonucleotide
  source 1..25: mol_type = other DNA
caggggctgggggaacgccgggaag

SEQ ID NO: 34724 - DNA, 25 bp, synthetic construct
  misc_feature 1..25: note = Oligonucleotide
  source 1..25: mol_type = other DNA
cgccaggggctgggggaacgccggg

SEQ ID NO: 34725 - DNA, 25 bp, synthetic construct
  misc_feature 1..25: note = Oligonucleotide
  source 1..25: mol_type = other DNA
ccacgccaggggctgggggaacgcc

SEQ ID NO: 34726 - DNA, 25 bp, synthetic construct
  misc_feature 1..25: note = Oligonucleotide
  source 1..25: mol_type = other DNA
ctgccacgccaggggctgggggaac

SEQ ID NO: 34727 - DNA, 25 bp, synthetic construct
  misc_feature 1..25: note = Oligonucleotide
  source 1..25: mol_type = other DNA
gctctgccacgccaggggctggggg

SEQ ID NO: 34728 - DNA, 25 bp, synthetic construct
  misc_feature 1..25: note = Oligonucleotide
  source 1..25: mol_type = other DNA
agggctctgccacgccaggggctgg

SEQ ID NO: 34729 - DNA, 25 bp, synthetic construct
  misc_feature 1..25: note = Oligonucleotide
  source 1..25: mol_type = other DNA
aggagggctctgccacgccaggggc

SEQ ID NO: 34730 - DNA, 25 bp, synthetic construct
  misc_feature 1..25: note = Oligonucleotide
  source 1..25: mol_type = other DNA
ggaaggagggctctgccacgccagg

SEQ ID NO: 34731 - DNA, 25 bp, synthetic construct
  misc_feature 1..25: note = Oligonucleotide
  source 1..25: mol_type = other DNA
tagggaaggagggctctgccacgcc

SEQ ID NO: 34732 - DNA, 25 bp, synthetic construct
  misc_feature 1..25: note = Oligonucleotide
  source 1..25: mol_type = other DNA
gtgtagggaaggagggctctgccac

SEQ ID NO: 34733 - DNA, 25 bp, synthetic construct
  misc_feature 1..25: note = Oligonucleotide
  source 1..25: mol_type = other DNA
gcggtgtagggaaggagggctctgc

SEQ ID NO: 34734 - DNA, 25 bp, synthetic construct
  misc_feature 1..25: note = Oligonucleotide
  source 1..25: mol_type = other DNA
ctggcggtgtagggaaggagggctc

SEQ ID NO: 34735 - DNA, 25 bp, synthetic construct
  misc_feature 1..25: note = Oligonucleotide
  source 1..25: mol_type = other DNA
ctgctggcggtgtagggaaggaggg

SEQ ID NO: 34736 - DNA, 25 bp, synthetic construct
  misc_feature 1..25: note = Oligonucleotide
  source 1..25: mol_type = other DNA
cagctgctggcggtgtagggaagga

SEQ ID NO: 34737 - DNA, 25 bp, synthetic construct
  misc_feature 1..25: note = Oligonucleotide
  source 1..25: mol_type = other DNA
aggcagctgctggcggtgtagggaa

SEQ ID NO: 34738 - DNA, 25 bp, synthetic construct
  misc_feature 1..25: note = Oligonucleotide
  source 1..25: mol_type = other DNA
tccaggcagctgctggcggtgtagg

SEQ ID NO: 34739 - DNA, 25 bp, synthetic construct
  misc_feature 1..25: note = Oligonucleotide
  source 1..25: mol_type = other DNA
gcctccaggcagctgctggcggtgt

SEQ ID NO: 34740 - DNA, 25 bp, synthetic construct
  misc_feature 1..25: note = Oligonucleotide
  source 1..25: mol_type = other DNA
ccggcctccaggcagctgctggcgg

SEQ ID NO: 34741 - DNA, 25 bp, synthetic construct
  misc_feature 1..25: note = Oligonucleotide
  source 1..25: mol_type = other DNA
accccggcctccaggcagctgctgg

SEQ ID NO: 34742 - DNA, 25 bp, synthetic construct
  misc_feature 1..25: note = Oligonucleotide
  source 1..25: mol_type = other DNA
gcaaccccggcctccaggcagctgc

SEQ ID NO: 34743 - DNA, 25 bp, synthetic construct
  misc_feature 1..25: note = Oligonucleotide
  source 1..25: mol_type = other DNA
atggcaaccccggcctccaggcagc

SEQ ID NO: 34744 - DNA, 25 bp, synthetic construct
  misc_feature 1..25: note = Oligonucleotide
  source 1..25: mol_type = other DNA
gctatggcaaccccggcctccaggc

SEQ ID NO: 34745 - DNA, 25 bp, synthetic construct
  misc_feature 1..25: note = Oligonucleotide
  source 1..25: mol_type = other DNA
gttgctatggcaaccccggcctcca

SEQ ID NO: 34746 - DNA, 25 bp, synthetic construct
  misc_feature 1..25: note = Oligonucleotide
  source 1..25: mol_type = other DNA
acagttgctatggcaaccccggcct

SEQ ID NO: 34747 - DNA, 25 bp, synthetic construct
  misc_feature 1..25: note = Oligonucleotide
  source 1..25: mol_type = other DNA
ctcacagttgctatggcaaccccgg

SEQ ID NO: 34748 - DNA, 25 bp, synthetic construct
  misc_feature 1..25: note = Oligonucleotide
  source 1..25: mol_type = other DNA
aacctcacagttgctatggcaaccc

SEQ ID NO: 34749 - DNA, 25 bp, synthetic construct
  misc_feature 1..25: note = Oligonucleotide
  source 1..25: mol_type = other DNA
gtcaacctcacagttgctatggcaa

SEQ ID NO: 34750 - DNA, 25 bp, synthetic construct
  misc_feature 1..25: note = Oligonucleotide
  source 1..25: mol_type = other DNA
agcgtcaacctcacagttgctatgg

SEQ ID NO: 34751 - DNA, 25 bp, synthetic construct
  misc_feature 1..25: note = Oligonucleotide
  source 1..25: mol_type = other DNA
ggcagcgtcaacctcacagttgcta

SEQ ID NO: 34752 - DNA, 25 bp, synthetic construct
  misc_feature 1..25: note = Oligonucleotide
  source 1..25: mol_type = other DNA
cgcggcagcgtcaacctcacagttg

SEQ ID NO: 34753 - DNA, 25 bp, synthetic construct
  misc_feature 1..25: note = Oligonucleotide
  source 1..25: mol_type = other DNA
cagcgcggcagcgtcaacctcacag

SEQ ID NO: 34754 - DNA, 25 bp, synthetic construct
  misc_feature 1..25: note = Oligonucleotide
  source 1..25: mol_type = other DNA
aagcagcgcggcagcgtcaacctca

SEQ ID NO: 34755 - DNA, 25 bp, synthetic construct
  misc_feature 1..25: note = Oligonucleotide
  source 1..25: mol_type = other DNA
aataagcagcgcggcagcgtcaacc

SEQ ID NO: 34756 - DNA, 25 bp, synthetic construct
  misc_feature 1..25: note = Oligonucleotide
  source 1..25: mol_type = other DNA
gacaataagcagcgcggcagcgtca

SEQ ID NO: 34757 - DNA, 25 bp, synthetic construct
  misc_feature 1..25: note = Oligonucleotide
  source 1..25: mol_type = other DNA
tccgacaataagcagcgcggcagcg

SEQ ID NO: 34758 - DNA, 25 bp, synthetic construct
  misc_feature 1..25: note = Oligonucleotide
  source 1..25: mol_type = other DNA
ccctccgacaataagcagcgcggca

SEQ ID NO: 34759 - DNA, 25 bp, synthetic construct
  misc_feature 1..25: note = Oligonucleotide
  source 1..25: mol_type = other DNA
cttccctccgacaataagcagcgcg

SEQ ID NO: 34760 - DNA, 25 bp, synthetic construct
  misc_feature 1..25: note = Oligonucleotide
  source 1..25: mol_type = other DNA
ccccttccctccgacaataagcagc

SEQ ID NO: 34761 - DNA, 25 bp, synthetic construct
  misc_feature 1..25: note = Oligonucleotide
  source 1..25: mol_type = other DNA
ctcccccttccctccgacaataagc

SEQ ID NO: 34762 - DNA, 25 bp, synthetic construct
  misc_feature 1..25: note = Oligonucleotide
  source 1..25: mol_type = other DNA
cgcctcccccttccctccgacaata

SEQ ID NO: 34763 - DNA, 25 bp, synthetic construct
  misc_feature 1..25: note = Oligonucleotide
  source 1..25: mol_type = other DNA
tgccgcctcccccttccctccgaca

SEQ ID NO: 34764 - DNA, 25 bp, synthetic construct
  misc_feature 1..25: note = Oligonucleotide
  source 1..25: mol_type = other DNA
aggtgccgcctcccccttccctccg

SEQ ID NO: 34765 - DNA, 25 bp, synthetic construct
  misc_feature 1..25: note = Oligonucleotide
  source 1..25: mol_type = other DNA
ctcaggtgccgcctcccccttccct

SEQ ID NO: 34766 - DNA, 25 bp, synthetic construct
  misc_feature 1..25: note = Oligonucleotide
  source 1..25: mol_type = other DNA
tccctcaggtgccgcctcccccttc

SEQ ID NO: 34767 - DNA, 25 bp, synthetic construct
  misc_feature 1..25: note = Oligonucleotide
  source 1..25: mol_type = other DNA
tcttccctcaggtgccgcctccccc

SEQ ID NO: 34768 - DNA, 25 bp, synthetic construct
  misc_feature 1..25: note = Oligonucleotide
  source 1..25: mol_type = other DNA
tcctcttccctcaggtgccgcctcc

SEQ ID NO: 34769 - DNA, 25 bp, synthetic construct
  misc_feature 1..25: note = Oligonucleotide
  source 1..25: mol_type = other DNA
ttttcctcttccctcaggtgccgcc

SEQ ID NO: 34770 - DNA, 25 bp, synthetic construct
  misc_feature 1..25: note = Oligonucleotide
  source 1..25: mol_type = other DNA
cgcttttcctcttccctcaggtgcc

SEQ ID NO: 34771 - DNA, 25 bp, synthetic construct
  misc_feature 1..25: note = Oligonucleotide
  source 1..25: mol_type = other DNA
agacgcttttcctcttccctcaggt

SEQ ID NO: 34772 - DNA, 25 bp, synthetic construct
  misc_feature 1..25: note = Oligonucleotide
  source 1..25: mol_type = other DNA
agaagacgcttttcctcttccctca

SEQ ID NO: 34773 - DNA, 25 bp, synthetic construct
  misc_feature 1..25: note = Oligonucleotide
  source 1..25: mol_type = other DNA
gggagaagacgcttttcctcttccc

SEQ ID NO: 34774 - DNA, 25 bp, synthetic construct
  misc_feature 1..25: note = Oligonucleotide
  source 1..25: mol_type = other DNA
gcggggagaagacgcttttcctctt

SEQ ID NO: 34775 - DNA, 25 bp, synthetic construct
  misc_feature 1..25: note = Oligonucleotide
  source 1..25: mol_type = other DNA
gtcgcggggagaagacgcttttcct

SEQ ID NO: 34776 - DNA, 25 bp, synthetic construct
  misc_feature 1..25: note = Oligonucleotide
  source 1..25: mol_type = other DNA
gtcgtcgcggggagaagacgctttt

SEQ ID NO: 34777 - DNA, 25 bp, synthetic construct
  misc_feature 1..25: note = Oligonucleotide
  source 1..25: mol_type = other DNA
cgcgtcgtcgcggggagaagacgct

SEQ ID NO: 34778 - DNA, 25 bp, synthetic construct
  misc_feature 1..25: note = Oligonucleotide
  source 1..25: mol_type = other DNA
tgccgcgtcgtcgcggggagaagac

SEQ ID NO: 34779 - DNA, 25 bp, synthetic construct
  misc_feature 1..25: note = Oligonucleotide
  source 1..25: mol_type = other DNA
ctgtgccgcgtcgtcgcggggagaa

SEQ ID NO: 34780 - DNA, 25 bp, synthetic construct
  misc_feature 1..25: note = Oligonucleotide
  source 1..25: mol_type = other DNA
aggctgtgccgcgtcgtcgcgggga

SEQ ID NO: 34781 - DNA, 25 bp, synthetic construct
  misc_feature 1..25: note = Oligonucleotide
  source 1..25: mol_type = other DNA
cccaggctgtgccgcgtcgtcgcgg

SEQ ID NO: 34782 - DNA, 25 bp, synthetic construct
  misc_feature 1..25: note = Oligonucleotide
  source 1..25: mol_type = other DNA
gggcccaggctgtgccgcgtcgtcg

SEQ ID NO: 34783 - DNA, 25 bp, synthetic construct
  misc_feature 1..25: note = Oligonucleotide
  source 1..25: mol_type = other DNA
cctgggcccaggctgtgccgcgtcg

SEQ ID NO: 34784 - DNA, 25 bp, synthetic construct
  misc_feature 1..25: note = Oligonucleotide
  source 1..25: mol_type = other DNA
cctcctgggcccaggctgtgccgcg

SEQ ID NO: 34785 - DNA, 25 bp, synthetic construct
  misc_feature 1..25: note = Oligonucleotide
  source 1..25: mol_type = other DNA
aagcctcctgggcccaggctgtgcc

SEQ ID NO: 34786 - DNA, 25 bp, synthetic construct
  misc_feature 1..25: note = Oligonucleotide
  source 1..25: mol_type = other DNA
gcaaagcctcctgggcccaggctgt

SEQ ID NO: 34787 - DNA, 25 bp, synthetic construct
  misc_feature 1..25: note = Oligonucleotide
  source 1..25: mol_type = other DNA
ccggcaaagcctcctgggcccaggc

SEQ ID NO: 34788 - DNA, 25 bp, synthetic construct
  misc_feature 1..25: note = Oligonucleotide
  source 1..25: mol_type = other DNA
tggccggcaaagcctcctgggccca

SEQ ID NO: 34789 - DNA, 25 bp, synthetic construct
  misc_feature 1..25: note = Oligonucleotide
  source 1..25: mol_type = other DNA
gcctggccggcaaagcctcctgggc

SEQ ID NO: 34790 - DNA, 25 bp, synthetic construct
  misc_feature 1..25: note = Oligonucleotide
  source 1..25: mol_type = other DNA
tgggcctggccggcaaagcctcctg

SEQ ID NO: 34791 - DNA, 25 bp, synthetic construct
  misc_feature 1..25: note = Oligonucleotide
  source 1..25: mol_type = other DNA
ggctgggcctggccggcaaagcctc

SEQ ID NO: 34792 - DNA, 25 bp, synthetic construct
  misc_feature 1..25: note = Oligonucleotide
  source 1..25: mol_type = other DNA
ctgggctgggcctggccggcaaagc

SEQ ID NO: 34793 - DNA, 25 bp, synthetic construct
  misc_feature 1..25: note = Oligonucleotide
  source 1..25: mol_type = other DNA
ggcctgggctgggcctggccggcaa

SEQ ID NO: 34794 - DNA, 25 bp, synthetic construct
  misc_feature 1..25: note = Oligonucleotide
  source 1..25: mol_type = other DNA
acgggcctgggctgggcctggccgg

SEQ ID NO: 34795 - DNA, 25 bp, synthetic construct
  misc_feature 1..25: note = Oligonucleotide
  source 1..25: mol_type = other DNA
gccacgggcctgggctgggcctggc

SEQ ID NO: 34796 - DNA, 25 bp, synthetic construct
  misc_feature 1..25: note = Oligonucleotide
  source 1..25: mol_type = other DNA
caagccacgggcctgggctgggcct

SEQ ID NO: 34797 - DNA, 25 bp, synthetic construct
  misc_feature 1..25: note = Oligonucleotide
  source 1..25: mol_type = other DNA
agccaagccacgggcctgggctggg

SEQ ID NO: 34798 - DNA, 25 bp, synthetic construct
  misc_feature 1..25: note = Oligonucleotide
  source 1..25: mol_type = other DNA
gtcagccaagccacgggcctgggct

SEQ ID NO: 34799 - DNA, 25 bp, synthetic construct
  misc_feature 1..25: note = Oligonucleotide
  source 1..25: mol_type = other DNA
gtggtcagccaagccacgggcctgg

SEQ ID NO: 34800 - DNA, 25 bp, synthetic construct
  misc_feature 1..25: note = Oligonucleotide
  source 1..25: mol_type = other DNA
ggtgtggtcagccaagccacgggcc

SEQ ID NO: 34801 - DNA, 25 bp, synthetic construct
  misc_feature 1..25: note = Oligonucleotide
  source 1..25: mol_type = other DNA
cagggtgtggtcagccaagccacgg

SEQ ID NO: 34802 - DNA, 25 bp, synthetic construct
  misc_feature 1..25: note = Oligonucleotide
  source 1..25: mol_type = other DNA
ggccagggtgtggtcagccaagcca

SEQ ID NO: 34803 - DNA, 25 bp, synthetic construct
  misc_feature 1..25: note = Oligonucleotide
  source 1..25: mol_type = other DNA
tggggccagggtgtggtcagccaag

SEQ ID NO: 34804 - DNA, 25 bp, synthetic construct
  misc_feature 1..25: note = Oligonucleotide
  source 1..25: mol_type = other DNA
ttgtggggccagggtgtggtcagcc

SEQ ID NO: 34805 - DNA, 25 bp, synthetic construct
  misc_feature 1..25: note = Oligonucleotide
  source 1..25: mol_type = other DNA
cccttgtggggccagggtgtggtca

SEQ ID NO: 34806 - DNA, 25 bp, synthetic construct
  misc_feature 1..25: note = Oligonucleotide
  source 1..25: mol_type = other DNA
tgccccttgtggggccagggtgtgg

SEQ ID NO: 34807 - DNA, 25 bp, synthetic construct
  misc_feature 1..25: note = Oligonucleotide
  source 1..25: mol_type = other DNA
cactgccccttgtggggccagggtg

SEQ ID NO: 34808 - DNA, 25 bp, synthetic construct
  misc_feature 1..25: note = Oligonucleotide
  source 1..25: mol_type = other DNA
ggccactgccccttgtggggccagg

SEQ ID NO: 34809 - DNA, 25 bp, synthetic construct
  misc_feature 1..25: note = Oligonucleotide
  source 1..25: mol_type = other DNA
ggtggccactgccccttgtggggcc

SEQ ID NO: 34810 - DNA, 25 bp, synthetic construct
  misc_feature 1..25: note = Oligonucleotide
  source 1..25: mol_type = other DNA
ccgggtggccactgccccttgtggg

SEQ ID NO: 34811 - DNA, 25 bp, synthetic construct
  misc_feature 1..25: note = Oligonucleotide
  source 1..25: mol_type = other DNA
ggcccgggtggccactgccccttgt

SEQ ID NO: 34812 - DNA, 25 bp, synthetic construct
  misc_feature 1..25: note = Oligonucleotide
  source 1..25: mol_type = other DNA
ccaggcccgggtggccactgcccct

SEQ ID NO: 34813 - DNA, 25 bp, synthetic construct
  misc_feature 1..25: note = Oligonucleotide
  source 1..25: mol_type = other DNA
cccccaggcccgggtggccactgcc

SEQ ID NO: 34814 - DNA, 25 bp, synthetic construct
  misc_feature 1..25: note = Oligonucleotide
  source 1..25: mol_type = other DNA
ctccccccaggcccgggtggccact

SEQ ID NO: 34815 - DNA, 25 bp, synthetic construct
  misc_feature 1..25: note = Oligonucleotide
  source 1..25: mol_type = other DNA
gggctccccccaggcccgggtggcc

SEQ ID NO: 34816 - DNA, 25 bp, synthetic construct
  misc_feature 1..25: note = Oligonucleotide
  source 1..25: mol_type = other DNA
ccagggctccccccaggcccgggtg

SEQ ID NO: 34817 - DNA, 25 bp, synthetic construct
  misc_feature 1..25: note = Oligonucleotide
  source 1..25: mol_type = other DNA
gctccagggctccccccaggcccgg

SEQ ID NO: 34818 - DNA, 25 bp, synthetic construct
  misc_feature 1..25: note = Oligonucleotide
  source 1..25: mol_type = other DNA
gctgctccagggctccccccaggcc

SEQ ID NO: 34819 - DNA, 25 bp, synthetic construct
  misc_feature 1..25: note = Oligonucleotide
  source 1..25: mol_type = other DNA
cctgctgctccagggctccccccag

SEQ ID NO: 34820 - DNA, 25 bp, synthetic construct
  misc_feature 1..25: note = Oligonucleotide
  source 1..25: mol_type = other DNA
gctcctgctgctccagggctccccc

SEQ ID NO: 34821 - DNA, 25 bp, synthetic construct
  misc_feature 1..25: note = Oligonucleotide
  source 1..25: mol_type = other DNA
ggggctcctgctgctccagggctcc

SEQ ID NO: 34822 - DNA, 25 bp, synthetic construct
  misc_feature 1..25: note = Oligonucleotide
  source 1..25: mol_type = other DNA
ggcggggctcctgctgctccagggc

SEQ ID NO: 34823 - DNA, 25 bp, synthetic construct
  misc_feature 1..25: note = Oligonucleotide
  source 1..25: mol_type = other DNA
gcgggcggggctcctgctgctccag

SEQ ID NO: 34824 - DNA, 25 bp, synthetic construct
  misc_feature 1..25: note = Oligonucleotide
  source 1..25: mol_type = other DNA
cttgcgggcggggctcctgctgctc

SEQ ID NO: 34825 - DNA, 25 bp, synthetic construct
  misc_feature 1..25: note = Oligonucleotide
  source 1..25: mol_type = other DNA
ctccttgcgggcggggctcctgctg

SEQ ID NO: 34826 - DNA, 25 bp, synthetic construct
  misc_feature 1..25: note = Oligonucleotide
  source 1..25: mol_type = other DNA
ggtctccttgcgggcggggctcctg

SEQ ID NO: 34827 - DNA, 25 bp, synthetic construct
  misc_feature 1..25: note = Oligonucleotide
  source 1..25: mol_type = other DNA
aggggtctccttgcgggcggggctc

SEQ ID NO: 34828 - DNA, 25 bp, synthetic construct
  misc_feature 1..25: note = Oligonucleotide
  source 1..25: mol_type = other DNA
gggaggggtctccttgcgggcgggg

SEQ ID NO: 34829 - DNA, 25 bp, synthetic construct
  misc_feature 1..25: note = Oligonucleotide
  source 1..25: mol_type = other DNA
gctgggaggggtctccttgcgggcg

SEQ ID NO: 34830 - DNA, 25 bp, synthetic construct
  misc_feature 1..25: note = Oligonucleotide
  source 1..25: mol_type = other DNA
ggggctgggaggggtctccttgcgg

SEQ ID NO: 34831 - DNA, 25 bp, synthetic construct
  misc_feature 1..25: note = Oligonucleotide
  source 1..25: mol_type = other DNA
gtgggggctgggaggggtctccttg

SEQ ID NO: 34832 - DNA, 25 bp, synthetic construct
  misc_feature 1..25: note = Oligonucleotide
  source 1..25: mol_type = other DNA
ggggtgggggctgggaggggtctcc

SEQ ID NO: 34833 - DNA, 25 bp, synthetic construct
  misc_feature 1..25: note = Oligonucleotide
  source 1..25: mol_type = other DNA
catggggtgggggctgggaggggtc

SEQ ID NO: 34834 - DNA, 25 bp, synthetic construct
  misc_feature 1..25: note = Oligonucleotide
  source 1..25: mol_type = other DNA
agccatggggtgggggctgggaggg

SEQ ID NO: 34835 - DNA, 25 bp, synthetic construct
  misc_feature 1..25: note = Oligonucleotide
  source 1..25: mol_type = other DNA
cagagccatggggtgggggctggga

SEQ ID NO: 34836 - DNA, 25 bp, synthetic construct
  misc_feature 1..25: note = Oligonucleotide
  source 1..25: mol_type = other DNA
caccagagccatggggtgggggctg

SEQ ID NO: 34837 - DNA, 25 bp, synthetic construct
  misc_feature 1..25: note = Oligonucleotide
  source 1..25: mol_type = other DNA
gggcaccagagccatggggtggggg

SEQ ID NO: 34838 - DNA, 25 bp, synthetic construct
  misc_feature 1..25: note = Oligonucleotide
  source 1..25: mol_type = other DNA
agggggcaccagagccatggggtgg

SEQ ID NO: 34839 - DNA, 25 bp, synthetic construct
  misc_feature 1..25: note = Oligonucleotide
  source 1..25: mol_type = other DNA
gcaagggggcaccagagccatgggg

SEQ ID NO: 34840 - DNA, 25 bp, synthetic construct
  misc_feature 1..25: note = Oligonucleotide
  source 1..25: mol_type = other DNA
taagcaagggggcaccagagccatg

SEQ ID NO: 34841 - DNA, 25 bp, synthetic construct
  misc_feature 1..25: note = Oligonucleotide
  source 1..25: mol_type = other DNA
ggctaagcaagggggcaccagagcc

SEQ ID NO: 34842 - DNA, 25 bp, synthetic construct
  misc_feature 1..25: note = Oligonucleotide
  source 1..25: mol_type = other DNA
gagggctaagcaagggggcaccaga

SEQ ID NO: 34843 - DNA, 25 bp, synthetic construct
  misc_feature 1..25: note = Oligonucleotide
  source 1..25: mol_type = other DNA
ttcgagggctaagcaagggggcacc

SEQ ID NO: 34844 - DNA, 25 bp, synthetic construct
  misc_feature 1..25: note = Oligonucleotide
  source 1..25: mol_type = other DNA
ggcttcgagggctaagcaagggggc

SEQ ID NO: 34845 - DNA, 25 bp, synthetic construct
  misc_feature 1..25: note = Oligonucleotide
  source 1..25: mol_type = other DNA
gcaggcttcgagggctaagcaaggg

SEQ ID NO: 34846 - DNA, 25 bp, synthetic construct
  misc_feature 1..25: note = Oligonucleotide
  source 1..25: mol_type = other DNA
cctgcaggcttcgagggctaagcaa

SEQ ID NO: 34847 - DNA, 25 bp, synthetic construct
  misc_feature 1..25: note = Oligonucleotide
  source 1..25: mol_type = other DNA
caccctgcaggcttcgagggctaag

SEQ ID NO: 34848 - DNA, 25 bp, synthetic construct
  misc_feature 1..25: note = Oligonucleotide
  source 1..25: mol_type = other DNA
acccaccctgcaggcttcgagggct

SEQ ID NO: 34849 - DNA, 25 bp, synthetic construct
  misc_feature 1..25: note = Oligonucleotide
  source 1..25: mol_type = other DNA
agcacccaccctgcaggcttcgagg

SEQ ID NO: 34850 - DNA, 25 bp, synthetic construct
  misc_feature 1..25: note = Oligonucleotide
  source 1..25: mol_type = other DNA
ctgagcacccaccctgcaggcttcg

SEQ ID NO: 34851 - DNA, 25 bp, synthetic construct
  misc_feature 1..25: note = Oligonucleotide
  source 1..25: mol_type = other DNA
ggcctgagcacccaccctgcaggct

SEQ ID NO: 34852 - DNA, 25 bp, synthetic construct
  misc_feature 1..25: note = Oligonucleotide
  source 1..25: mol_type = other DNA
tctggcctgagcacccaccctgcag

SEQ ID NO: 34853 - DNA, 25 bp, synthetic construct
  misc_feature 1..25: note = Oligonucleotide
  source 1..25: mol_type = other DNA
ggctctggcctgagcacccaccctg

SEQ ID NO: 34854 - DNA, 25 bp, synthetic construct
  misc_feature 1..25: note = Oligonucleotide
  source 1..25: mol_type = other DNA
gctggctctggcctgagcacccacc

SEQ ID NO: 34855 - DNA, 25 bp, synthetic construct
  misc_feature 1..25: note = Oligonucleotide
  source 1..25: mol_type = other DNA
ccggctggctctggcctgagcaccc

SEQ ID NO: 34856 - DNA, 25 bp, synthetic construct
  misc_feature 1..25: note = Oligonucleotide
  source 1..25: mol_type = other DNA
gtgccggctggctctggcctgagca

SEQ ID NO: 34857 - DNA, 25 bp, synthetic construct
  misc_feature 1..25: note = Oligonucleotide
  source 1..25: mol_type = other DNA
acggtgccggctggctctggcctga

SEQ ID NO: 34858 - DNA, 25 bp, synthetic construct
  misc_feature 1..25: note = Oligonucleotide
  source 1..25: mol_type = other DNA
gtcacggtgccggctggctctggcc

SEQ ID NO: 34859 - DNA, 25 bp, synthetic construct
  misc_feature 1..25: note = Oligonucleotide
  source 1..25: mol_type = other DNA
ggggtcacggtgccggctggctctg

SEQ ID NO: 34860 - DNA, 25 bp, synthetic construct
  misc_feature 1..25: note = Oligonucleotide
  source 1..25: mol_type = other DNA
gcgggggtcacggtgccggctggct

SEQ ID NO: 34861 - DNA, 25 bp, synthetic construct
  misc_feature 1..25: note = Oligonucleotide
  source 1..25: mol_type = other DNA
ctggcgggggtcacggtgccggctg

SEQ ID NO: 34862 - DNA, 25 bp, synthetic construct
  misc_feature 1..25: note = Oligonucleotide
  source 1..25: mol_type = other DNA
gtgctggcgggggtcacggtgccgg

SEQ ID NO: 34863 - DNA, 25 bp, synthetic construct
  misc_feature 1..25: note = Oligonucleotide
  source 1..25: mol_type = other DNA
agggtgctggcgggggtcacggtgc

SEQ ID NO: 34864 - DNA, 25 bp, synthetic construct
  misc_feature 1..25: note = Oligonucleotide
  source 1..25: mol_type = other DNA
tcaagggtgctggcgggggtcacgg

SEQ ID NO: 34865 - DNA, 25 bp, synthetic construct
  misc_feature 1..25: note = Oligonucleotide
  source 1..25: mol_type = other DNA
cgatcaagggtgctggcgggggtca

SEQ ID NO: 34866 - DNA, 25 bp, synthetic construct
  misc_feature 1..25: note = Oligonucleotide
  source 1..25: mol_type = other DNA
agacgatcaagggtgctggcggggg

SEQ ID NO: 34867 - DNA, 25 bp, synthetic construct
  misc_feature 1..25: note = Oligonucleotide
  source 1..25: mol_type = other DNA
aggagacgatcaagggtgctggcgg

SEQ ID NO: 34868 - DNA, 25 bp, synthetic construct
  misc_feature 1..25: note = Oligonucleotide
  source 1..25: mol_type = other DNA
ctcaggagacgatcaagggtgctgg

SEQ ID NO: 34869 - DNA, 25 bp, synthetic construct
  misc_feature 1..25: note = Oligonucleotide
  source 1..25: mol_type = other DNA
ggcctcaggagacgatcaagggtgc

SEQ ID NO: 34870 - DNA, 25 bp, synthetic construct
  misc_feature 1..25: note = Oligonucleotide
  source 1..25: mol_type = other DNA
cagggcctcaggagacgatcaaggg

SEQ ID NO: 34871 - DNA, 25 bp, synthetic construct
  misc_feature 1..25: note = Oligonucleotide
  source 1..25: mol_type = other DNA
aatcagggcctcaggagacgatcaa

SEQ ID NO: 34872 - DNA, 25 bp, synthetic construct
  misc_feature 1..25: note = Oligonucleotide
  source 1..25: mol_type = other DNA
cagaatcagggcctcaggagacgat

SEQ ID NO: 34873 - DNA, 25 bp, synthetic construct
  misc_feature 1..25: note = Oligonucleotide
  source 1..25: mol_type = other DNA
ccccagaatcagggcctcaggagac

SEQ ID NO: 34874 - DNA, 25 bp, synthetic construct
  misc_feature 1..25: note = Oligonucleotide
  source 1..25: mol_type = other DNA
aacccccagaatcagggcctcagga

SEQ ID NO: 34875 - DNA, 25 bp, synthetic construct
  misc_feature 1..25: note = Oligonucleotide
  source 1..25: mol_type = other DNA
gggaacccccagaatcagggcctca

SEQ ID NO: 34876 - DNA, 25 bp, synthetic construct
  misc_feature 1..25: note = Oligonucleotide
  source 1..25: mol_type = other DNA
cctgggaacccccagaatcagggcc

SEQ ID NO: 34877 - DNA, 25 bp, synthetic construct
  misc_feature 1..25: note = Oligonucleotide
  source 1..25: mol_type = other DNA
ggccctgggaacccccagaatcagg

SEQ ID NO: 34878 - DNA, 25 bp, synthetic construct
  misc_feature 1..25: note = Oligonucleotide
  source 1..25: mol_type = other DNA
aggggccctgggaacccccagaatc

SEQ ID NO: 34879 - DNA, 25 bp, synthetic construct
  misc_feature 1..25: note = Oligonucleotide
  source 1..25: mol_type = other DNA
ctcaggggccctgggaacccccaga

SEQ ID NO: 34880 - DNA, 25 bp, synthetic construct
  misc_feature 1..25: note = Oligonucleotide
  source 1..25: mol_type = other DNA
ggcctcaggggccctgggaaccccc

SEQ ID NO: 34881 - DNA, 25 bp, synthetic construct
  misc_feature 1..25: note = Oligonucleotide
  source 1..25: mol_type = other DNA
cagggcctcaggggccctgggaacc

SEQ ID NO: 34882 - DNA, 25 bp, synthetic construct
  misc_feature 1..25: note = Oligonucleotide
  source 1..25: mol_type = other DNA
ggtcagggcctcaggggccctggga

SEQ ID NO: 34883 - DNA, 25 bp, synthetic construct
  misc_feature 1..25: note = Oligonucleotide
  source 1..25: mol_type = other DNA
ggcggtcagggcctcaggggccctg

SEQ ID NO: 34884 - DNA, 25 bp, synthetic construct
  misc_feature 1..25: note = Oligonucleotide
  source 1..25: mol_type = other DNA
gcgggcggtcagggcctcaggggcc

SEQ ID NO: 34885 - DNA, 25 bp, synthetic construct
  misc_feature 1..25: note = Oligonucleotide
  source 1..25: mol_type = other DNA
ggggcgggcggtcagggcctcaggg

SEQ ID NO: 34886 - DNA, 25 bp, synthetic construct
  misc_feature 1..25: note = Oligonucleotide
  source 1..25: mol_type = other DNA
gggggggcgggcggtcagggcctca

SEQ ID NO: 34887 - DNA, 25 bp, synthetic construct
  misc_feature 1..25: note = Oligonucleotide
  source 1..25: mol_type = other DNA
ggggggggggcgggcggtcagggcc

SEQ ID NO: 34888 - DNA, 25 bp, synthetic construct
  misc_feature 1..25: note = Oligonucleotide
  source 1..25: mol_type = other DNA
gggggggggggggcgggcggtcagg

SEQ ID NO: 34889 - DNA, 25 bp, synthetic construct
  misc_feature 1..25: note = Oligonucleotide
  source 1..25: mol_type = other DNA
tgcgggggggggggggcgggcggtc

SEQ ID NO: 34890 - DNA, 25 bp, synthetic construct
  misc_feature 1..25: note = Oligonucleotide
  source 1..25: mol_type = other DNA
gagtgcgggggggggggggcgggcg

SEQ ID NO: 34891 - DNA, 25 bp, synthetic construct
  misc_feature 1..25: note = Oligonucleotide
  source 1..25: mol_type = other DNA
agggagtgcgggggggggggggcgg

SEQ ID NO: 34892 - DNA, 25 bp, synthetic construct
  misc_feature 1..25: note = Oligonucleotide
  source 1..25: mol_type = other DNA
ctcagggagtgcggggggggggggg

SEQ ID NO: 34893 - DNA, 25 bp, synthetic construct
  misc_feature 1..25: note = Oligonucleotide
  source 1..25: mol_type = other DNA
gagctcagggagtgcgggggggggg

SEQ ID NO: 34894 - DNA, 25 bp, synthetic construct
  misc_feature 1..25: note = Oligonucleotide
  source 1..25: mol_type = other DNA
aaggagctcagggagtgcggggggg

SEQ ID NO: 34895 - DNA, 25 bp, synthetic construct
  misc_feature 1..25: note = Oligonucleotide
  source 1..25: mol_type = other DNA
ctcaaggagctcagggagtgcgggg

SEQ ID NO: 34896 - DNA, 25 bp, synthetic construct
  misc_feature 1..25: note = Oligonucleotide
  source 1..25: mol_type = other DNA
tggctcaaggagctcagggagtgcg

SEQ ID NO: 34897 - DNA, 25 bp, synthetic construct
  misc_feature 1..25: note = Oligonucleotide
  source 1..25: mol_type = other DNA
tcatggctcaaggagctcagggagt

SEQ ID NO: 34898 - DNA, 25 bp, synthetic construct
  misc_feature 1..25: note = Oligonucleotide
  source 1..25: mol_type = other DNA
tcttcatggctcaaggagctcaggg

SEQ ID NO: 34899 - DNA, 25 bp, synthetic construct
  misc_feature 1..25: note = Oligonucleotide
  source 1..25: mol_type = other DNA
acttcttcatggctcaaggagctca

SEQ ID NO: 34900 - DNA, 25 bp, synthetic construct
  misc_feature 1..25: note = Oligonucleotide
  source 1..25: mol_type = other DNA
caaacttcttcatggctcaaggagc

SEQ ID NO: 34901 - DNA, 25 bp, synthetic construct
  misc_feature 1..25: note = Oligonucleotide
  source 1..25: mol_type = other DNA
acgcaaacttcttcatggctcaagg

SEQ ID NO: 34902 - DNA, 25 bp, synthetic construct
  misc_feature 1..25: note = Oligonucleotide
  source 1..25: mol_type = other DNA
tggacgcaaacttcttcatggctca

SEQ ID NO: 34903 - DNA, 25 bp, synthetic construct
  misc_feature 1..25: note = Oligonucleotide
  source 1..25: mol_type = other DNA
ggctggacgcaaacttcttcatggc

SEQ ID NO: 34904 - DNA, 25 bp, synthetic construct
  misc_feature 1..25: note = Oligonucleotide
  source 1..25: mol_type = other DNA
tacggctggacgcaaacttcttcat

SEQ ID NO: 34905 - DNA, 25 bp, synthetic construct
  misc_feature 1..25: note = Oligonucleotide
  source 1..25: mol_type = other DNA
ggttacggctggacgcaaacttctt

SEQ ID NO: 34906 - DNA, 25 bp, synthetic construct
  misc_feature 1..25: note = Oligonucleotide
  source 1..25: mol_type = other DNA
tcaggttacggctggacgcaaactt

SEQ ID NO: 34907 - DNA, 25 bp, synthetic construct
  misc_feature 1..25: note = Oligonucleotide
  source 1..25: mol_type = other DNA
tgttcaggttacggctggacgcaaa

SEQ ID NO: 34908 - DNA, 25 bp, synthetic construct
  misc_feature 1..25: note = Oligonucleotide
  source 1..25: mol_type = other DNA
tcttgttcaggttacggctggacgc

SEQ ID NO: 34909 - DNA, 25 bp, synthetic construct
  misc_feature 1..25: note = Oligonucleotide
  source 1..25: mol_type = other DNA
ggatcttgttcaggttacggctgga

SEQ ID NO: 34910 - DNA, 25 bp, synthetic construct
  misc_feature 1..25: note = Oligonucleotide
  source 1..25: mol_type = other DNA
ccaggatcttgttcaggttacggct

SEQ ID NO: 34911 - DNA, 25 bp, synthetic construct
  misc_feature 1..25: note = Oligonucleotide
  source 1..25: mol_type = other DNA
gtgccaggatcttgttcaggttacg

SEQ ID NO: 34912 - DNA, 25 bp, synthetic construct
  misc_feature 1..25: note = Oligonucleotide
  source 1..25: mol_type = other DNA
actgtgccaggatcttgttcaggtt

SEQ ID NO: 34913 - DNA, 25 bp, synthetic construct
  misc_feature 1..25: note = Oligonucleotide
  source 1..25: mol_type = other DNA
cgcactgtgccaggatcttgttcag

SEQ ID NO: 34914 - DNA, 25 bp, synthetic construct
  misc_feature 1..25: note = Oligonucleotide
  source 1..25: mol_type = other DNA
agtcgcactgtgccaggatcttgtt

SEQ ID NO: 34915 - DNA, 25 bp, synthetic construct
  misc_feature 1..25: note = Oligonucleotide
  source 1..25: mol_type = other DNA
atgagtcgcactgtgccaggatctt

SEQ ID NO: 34916 - DNA, 25 bp, synthetic construct
  misc_feature 1..25: note = Oligonucleotide
  source 1..25: mol_type = other DNA
aggatgagtcgcactgtgccaggat

SEQ ID NO: 34917 - DNA, 25 bp, synthetic construct
  misc_feature 1..25: note = Oligonucleotide
  source 1..25: mol_type = other DNA
gcgaggatgagtcgcactgtgccag

SEQ ID NO: 34918 - DNA, 25 bp, synthetic construct
  misc_feature 1..25: note = Oligonucleotide
  source 1..25: mol_type = other DNA
cccgcgaggatgagtcgcactgtgc

SEQ ID NO: 34919 - DNA, 25 bp, synthetic construct
  misc_feature 1..25: note = Oligonucleotide
  source 1..25: mol_type = other DNA
actcccgcgaggatgagtcgcactg

SEQ ID NO: 34920 - DNA, 25 bp, synthetic construct
  misc_feature 1..25: note = Oligonucleotide
  source 1..25: mol_type = other DNA
cgtactcccgcgaggatgagtcgca

SEQ ID NO: 34921 - DNA, 25 bp, synthetic construct
  misc_feature 1..25: note = Oligonucleotide
  source 1..25: mol_type = other DNA
cctcgtactcccgcgaggatgagtc

SEQ ID NO: 34922 - DNA, 25 bp, synthetic construct
  misc_feature 1..25: note = Oligonucleotide
  source 1..25: mol_type = other DNA
tctcctcgtactcccgcgaggatga

SEQ ID NO: 34923 - DNA, 25 bp, synthetic construct
  misc_feature 1..25: note = Oligonucleotide
  source 1..25: mol_type = other DNA
ggatctcctcgtactcccgcgagga

SEQ ID NO: 34924 - DNA, 25 bp, synthetic construct
  misc_feature 1..25: note = Oligonucleotide
  source 1..25: mol_type = other DNA
cctggatctcctcgtactcccgcga

SEQ ID NO: 34925 - DNA, 25 bp, synthetic construct
  misc_feature 1..25: note = Oligonucleotide
  source 1..25: mol_type = other DNA
ccgcctggatctcctcgtactcccg

SEQ ID NO: 34926 - DNA, 25 bp, synthetic construct
  misc_feature 1..25: note = Oligonucleotide
  source 1..25: mol_type = other DNA
ccaccgcctggatctcctcgtactc

SEQ ID NO: 34927 - DNA, 25 bp, synthetic construct
  misc_feature 1..25: note = Oligonucleotide
  source 1..25: mol_type = other DNA
gctccaccgcctggatctcctcgta

SEQ ID NO: 34928 - DNA, 25 bp, synthetic construct
  misc_feature 1..25: note = Oligonucleotide
  source 1..25: mol_type = other DNA
tgcgctccaccgcctggatctcctc

SEQ ID NO: 34929 - DNA, 25 bp, synthetic construct
  misc_feature 1..25: note = Oligonucleotide
  source 1..25: mol_type = other DNA
acttgcgctccaccgcctggatctc

SEQ ID NO: 34930 - DNA, 25 bp, synthetic construct
  misc_feature 1..25: note = Oligonucleotide
  source 1..25: mol_type = other DNA
gccacttgcgctccaccgcctggat

SEQ ID NO: 34931 - DNA, 25 bp, synthetic construct
  misc_feature 1..25: note = Oligonucleotide
  source 1..25: mol_type = other DNA
ggtgccacttgcgctccaccgcctg

SEQ ID NO: 34932 - DNA, 25 bp, synthetic construct
  misc_feature 1..25: note = Oligonucleotide
  source 1..25: mol_type = other DNA
gcaggtgccacttgcgctccaccgc

SEQ ID NO: 34933 - DNA, 25 bp, synthetic construct
  misc_feature 1..25: note = Oligonucleotide
  source 1..25: mol_type = other DNA
ggtgcaggtgccacttgcgctccac

SEQ ID NO: 34934 - DNA, 25 bp, synthetic construct
  misc_feature 1..25: note = Oligonucleotide
  source 1..25: mol_type = other DNA
ccaggtgcaggtgccacttgcgctc

SEQ ID NO: 34935 - DNA, 25 bp, synthetic construct
  misc_feature 1..25: note = Oligonucleotide
  source 1..25: mol_type = other DNA
tggccaggtgcaggtgccacttgcg

SEQ ID NO: 34936 - DNA, 25 bp, synthetic construct
  misc_feature 1..25: note = Oligonucleotide
  source 1..25: mol_type = other DNA
gcgtggccaggtgcaggtgccactt

SEQ ID NO: 34937 - DNA, 25 bp, synthetic construct
  misc_feature 1..25: note = Oligonucleotide
  source 1..25: mol_type = other DNA
gcggcgtggccaggtgcaggtgcca

SEQ ID NO: 34938 - DNA, 25 bp, synthetic construct
  misc_feature 1..25: note = Oligonucleotide
  source 1..25: mol_type = other DNA
ggcgcggcgtggccaggtgcaggtg

SEQ ID NO: 34939 - DNA, 25 bp, synthetic construct
  misc_feature 1..25: note = Oligonucleotide
  source 1..25: mol_type = other DNA
ggcggcgcggcgtggccaggtgcag

SEQ ID NO: 34940 - DNA, 25 bp, synthetic construct
  misc_feature 1..25: note = Oligonucleotide
  source 1..25: mol_type = other DNA
gcaggcggcgcggcgtggccaggtg

SEQ ID NO: 34941 - DNA, 25 bp, synthetic construct
  misc_feature 1..25: note = Oligonucleotide
  source 1..25: mol_type = other DNA
gcagcaggcggcgcggcgtggccag

SEQ ID NO: 34942 - DNA, 25 bp, synthetic construct
  misc_feature 1..25: note = Oligonucleotide
  source 1..25: mol_type = other DNA
ccagcagcaggcggcgcggcgtggc

SEQ ID NO: 34943 - DNA, 25 bp, synthetic construct
  misc_feature 1..25: note = Oligonucleotide
  source 1..25: mol_type = other DNA
tgtccagcagcaggcggcgcggcgt

SEQ ID NO: 34944 - DNA, 25 bp, synthetic construct
  misc_feature 1..25: note = Oligonucleotide
  source 1..25: mol_type = other DNA
tcctgtccagcagcaggcggcgcgg

SEQ ID NO: 34945 - DNA, 25 bp, synthetic construct
  misc_feature 1..25: note = Oligonucleotide
  source 1..25: mol_type = other DNA
acctcctgtccagcagcaggcggcg

SEQ ID NO: 34946 - DNA, 25 bp, synthetic construct
  misc_feature 1..25: note = Oligonucleotide
  source 1..25: mol_type = other DNA
tggacctcctgtccagcagcaggcg

SEQ ID NO: 34947 - DNA, 25 bp, synthetic construct
  misc_feature 1..25: note = Oligonucleotide
  source 1..25: mol_type = other DNA
ccttggacctcctgtccagcagcag

SEQ ID NO: 34948 - DNA, 25 bp, synthetic construct
  misc_feature 1..25: note = Oligonucleotide
  source 1..25: mol_type = other DNA
aggccttggacctcctgtccagcag

SEQ ID NO: 34949 - DNA, 25 bp, synthetic construct
  misc_feature 1..25: note = Oligonucleotide
  source 1..25: mol_type = other DNA
gggaggccttggacctcctgtccag

SEQ ID NO: 34950 - DNA, 25 bp, synthetic construct
  misc_feature 1..25: note = Oligonucleotide
  source 1..25: mol_type = other DNA
agagggaggccttggacctcctgtc

SEQ ID NO: 34951 - DNA, 25 bp, synthetic construct
  misc_feature 1..25: note = Oligonucleotide
  source 1..25: mol_type = other DNA
agaagagggaggccttggacctcct

SEQ ID NO: 34952 - DNA, 25 bp, synthetic construct
  misc_feature 1..25: note = Oligonucleotide
  source 1..25: mol_type = other DNA
caaagaagagggaggccttggacct

SEQ ID NO: 34953 - DNA, 25 bp, synthetic construct
  misc_feature 1..25: note = Oligonucleotide
  source 1..25: mol_type = other DNA
ctgcaaagaagagggaggccttgga

SEQ ID NO: 34954 - DNA, 25 bp, synthetic construct
  misc_feature 1..25: note = Oligonucleotide
  source 1..25: mol_type = other DNA
gggctgcaaagaagagggaggcctt

SEQ ID NO: 34955 - DNA, 25 bp, synthetic construct
  misc_feature 1..25: note = Oligonucleotide
  source 1..25: mol_type = other DNA
gtggggctgcaaagaagagggaggc

SEQ ID NO: 34956 - DNA, 25 bp, synthetic construct
  misc_feature 1..25: note = Oligonucleotide
  source 1..25: mol_type = other DNA
gcggtggggctgcaaagaagaggga

SEQ ID NO: 34957 - DNA, 25 bp, synthetic construct
  misc_feature 1..25: note = Oligonucleotide
  source 1..25: mol_type = other DNA
ggggcggtggggctgcaaagaagag

SEQ ID NO: 34958 - DNA, 25 bp, synthetic construct
  misc_feature 1..25: note = Oligonucleotide
  source 1..25: mol_type = other DNA
tggggggcggtggggctgcaaagaa

SEQ ID NO: 34959 - DNA, 25 bp, synthetic construct
  misc_feature 1..25: note = Oligonucleotide
  source 1..25: mol_type = other DNA
tcttggggggcggtggggctgcaaa

SEQ ID NO: 34960 - DNA, 25 bp, synthetic construct
  misc_feature 1..25: note = Oligonucleotide
  source 1..25: mol_type = other DNA
ccctcttggggggcggtggggctgc

SEQ ID NO: 34961 - DNA, 25 bp, synthetic construct
  misc_feature 1..25: note = Oligonucleotide
  source 1..25: mol_type = other DNA
gggccctcttggggggcggtggggc

SEQ ID NO: 34962 - DNA, 25 bp, synthetic construct
  misc_feature 1..25: note = Oligonucleotide
  source 1..25: mol_type = other DNA
tgggggccctcttggggggcggtgg

SEQ ID NO: 34963 - DNA, 25 bp, synthetic construct
  misc_feature 1..25: note = Oligonucleotide
  source 1..25: mol_type = other DNA
tgctgggggccctcttggggggcgg

SEQ ID NO: 34964 - DNA, 25 bp, synthetic construct
  misc_feature 1..25: note = Oligonucleotide
  source 1..25: mol_type = other DNA
tggtgctgggggccctcttgggggg

SEQ ID NO: 34965 - DNA, 25 bp, synthetic construct
  misc_feature 1..25: note = Oligonucleotide
  source 1..25: mol_type = other DNA
gtgtggtgctgggggccctcttggg

SEQ ID NO: 34966 - DNA, 25 bp, synthetic construct
  misc_feature 1..25: note = Oligonucleotide
  source 1..25: mol_type = other DNA
tcagtgtggtgctgggggccctctt

SEQ ID NO: 34967 - DNA, 25 bp, synthetic construct
  misc_feature 1..25: note = Oligonucleotide
  source 1..25: mol_type = other DNA
gggtcagtgtggtgctgggggccct

SEQ ID NO: 34968 - DNA, 25 bp, synthetic construct
  misc_feature 1..25: note = Oligonucleotide
  source 1..25: mol_type = other DNA
gcagggtcagtgtggtgctgggggc

SEQ ID NO: 34969 - DNA, 25 bp, synthetic construct
  misc_feature 1..25: note = Oligonucleotide
  source 1..25: mol_type = other DNA
agcgcagggtcagtgtggtgctggg

SEQ ID NO: 34970 - DNA, 25 bp, synthetic construct
  misc_feature 1..25: note = Oligonucleotide
  source 1..25: mol_type = other DNA
tggagcgcagggtcagtgtggtgct

SEQ ID NO: 34971 - DNA, 25 bp, synthetic construct
  misc_feature 1..25: note = Oligonucleotide
  source 1..25: mol_type = other DNA
acttggagcgcagggtcagtgtggt

SEQ ID NO: 34972 - DNA, 25 bp, synthetic construct
  misc_feature 1..25: note = Oligonucleotide
  source 1..25: mol_type = other DNA
tggacttggagcgcagggtcagtgt

SEQ ID NO: 34973 - DNA, 25 bp, synthetic construct
  misc_feature 1..25: note = Oligonucleotide
  source 1..25: mol_type = other DNA
tcatggacttggagcgcagggtcag

SEQ ID NO: 34974 - DNA, 25 bp, synthetic construct
  misc_feature 1..25: note = Oligonucleotide
  source 1..25: mol_type = other DNA
ctgtcatggacttggagcgcagggt

SEQ ID NO: 34975 - DNA, 25 bp, synthetic construct
  misc_feature 1..25: note = Oligonucleotide
  source 1..25: mol_type = other DNA
cagctgtcatggacttggagcgcag

SEQ ID NO: 34976 - DNA, 25 bp, synthetic construct
  misc_feature 1..25: note = Oligonucleotide
  source 1..25: mol_type = other DNA
gctcagctgtcatggacttggagcg

SEQ ID NO: 34977 - DNA, 25 bp, synthetic construct
  misc_feature 1..25: note = Oligonucleotide
  source 1..25: mol_type = other DNA
cgagctcagctgtcatggacttgga

SEQ ID NO: 34978 - DNA, 25 bp, synthetic construct
  misc_feature 1..25: note = Oligonucleotide
  source 1..25: mol_type = other DNA
cctcgagctcagctgtcatggactt

SEQ ID NO: 34979 - DNA, 25 bp, synthetic construct
  misc_feature 1..25: note = Oligonucleotide
  source 1..25: mol_type = other DNA
gttcctcgagctcagctgtcatgga

SEQ ID NO: 34980 - DNA, 25 bp, synthetic construct
  misc_feature 1..25: note = Oligonucleotide
  source 1..25: mol_type = other DNA
caagttcctcgagctcagctgtcat

SEQ ID NO: 34981 - DNA, 25 bp, synthetic construct
  misc_feature 1..25: note = Oligonucleotide
  source 1..25: mol_type = other DNA
caccaagttcctcgagctcagctgt

SEQ ID NO: 34982 - DNA, 25 bp, synthetic construct
  misc_feature 1..25: note = Oligonucleotide
  source 1..25: mol_type = other DNA
actcaccaagttcctcgagctcagc

SEQ ID NO: 34983 - DNA, 25 bp, synthetic construct
  misc_feature 1..25: note = Oligonucleotide
  source 1..25: mol_type = other DNA
gccactcaccaagttcctcgagctc

SEQ ID NO: 34984 - DNA, 25 bp, synthetic construct
  misc_feature 1..25: note = Oligonucleotide
  source 1..25: mol_type = other DNA
cccgccactcaccaagttcctcgag

SEQ ID NO: 34985 - DNA, 25 bp, synthetic construct
  misc_feature 1..25: note = Oligonucleotide
  source 1..25: mol_type = other DNA
acccccgccactcaccaagttcctc

SEQ ID NO: 34986 - DNA, 25 bp, synthetic construct
  misc_feature 1..25: note = Oligonucleotide
  source 1..25: mol_type = other DNA
gccacccccgccactcaccaagttc

SEQ ID NO: 34987 - DNA, 25 bp, synthetic construct
  misc_feature 1..25: note = Oligonucleotide
  source 1..25: mol_type = other DNA
accgccacccccgccactcaccaag

SEQ ID NO: 34988 - DNA, 25 bp, synthetic construct
  misc_feature 1..25: note = Oligonucleotide
  source 1..25: mol_type = other DNA
tccaccgccacccccgccactcacc

SEQ ID NO: 34989 - DNA, 25 bp, synthetic construct
  misc_feature 1..25: note = Oligonucleotide
  source 1..25: mol_type = other DNA
acctccaccgccacccccgccactc

SEQ ID NO: 34990 - DNA, 25 bp, synthetic construct
  misc_feature 1..25: note = Oligonucleotide
  source 1..25: mol_type = other DNA
tccacctccaccgccacccccgcca

SEQ ID NO: 34991 - DNA, 25 bp, synthetic construct
  misc_feature 1..25: note = Oligonucleotide
  source 1..25: mol_type = other DNA
gcgtccacctccaccgccacccccg

SEQ ID NO: 34992 - DNA, 25 bp, synthetic construct
  misc_feature 1..25: note = Oligonucleotide
  source 1..25: mol_type = other DNA
cctgcgtccacctccaccgccaccc

SEQ ID NO: 34993 - DNA, 25 bp, synthetic construct
  misc_feature 1..25: note = Oligonucleotide
  source 1..25: mol_type = other DNA
ccacctgcgtccacctccaccgcca

SEQ ID NO: 34994 - DNA, 25 bp, synthetic construct
  misc_feature 1..25: note = Oligonucleotide
  source 1..25: mol_type = other DNA
cgtccacctgcgtccacctccaccg

SEQ ID NO: 34995 - DNA, 25 bp, synthetic construct
  misc_feature 1..25: note = Oligonucleotide
  source 1..25: mol_type = other DNA
gaccgtccacctgcgtccacctcca

SEQ ID NO: 34996 - DNA, 25 bp, synthetic construct
  misc_feature 1..25: note = Oligonucleotide
  source 1..25: mol_type = other DNA
atggaccgtccacctgcgtccacct

SEQ ID NO: 34997 - DNA, 25 bp, synthetic construct
  misc_feature 1..25: note = Oligonucleotide
  source 1..25: mol_type = other DNA
atcatggaccgtccacctgcgtcca

SEQ ID NO: 34998 - DNA, 25 bp, synthetic construct
  misc_feature 1..25: note = Oligonucleotide
  source 1..25: mol_type = other DNA
cccatcatggaccgtccacctgcgt

SEQ ID NO: 34999 - DNA, 25 bp, synthetic construct
  misc_feature 1..25: note = Oligonucleotide
  source 1..25: mol_type = other DNA
ctgcccatcatggaccgtccacctg

SEQ ID NO: 35000 - DNA, 25 bp, synthetic construct
  misc_feature 1..25: note = Oligonucleotide
  source 1..25: mol_type = other DNA
tgtctgcccatcatggaccgtccac

SEQ ID NO: 35001 - DNA, 25 bp, synthetic construct
  misc_feature 1..25: note = Oligonucleotide
  source 1..25: mol_type = other DNA
ccctgtctgcccatcatggaccgtc

SEQ ID NO: 35002 - DNA, 25 bp, synthetic construct
  misc_feature 1..25: note = Oligonucleotide
  source 1..25: mol_type = other DNA
cggccctgtctgcccatcatggacc

SEQ ID NO: 35003 - DNA, 25 bp, synthetic construct
  misc_feature 1..25: note = Oligonucleotide
  source 1..25: mol_type = other DNA
tcccggccctgtctgcccatcatgg

SEQ ID NO: 35004 - DNA, 25 bp, synthetic construct
  misc_feature 1..25: note = Oligonucleotide
  source 1..25: mol_type = other DNA
gtctcccggccctgtctgcccatca

SEQ ID NO: 35005 - DNA, 25 bp, synthetic construct
  misc_feature 1..25: note = Oligonucleotide
  source 1..25: mol_type = other DNA
tgtgtctcccggccctgtctgccca

SEQ ID NO: 35006 - DNA, 25 bp, synthetic construct
  misc_feature 1..25: note = Oligonucleotide
  source 1..25: mol_type = other DNA
acctgtgtctcccggccctgtctgc

SEQ ID NO: 35007 - DNA, 25 bp, synthetic construct
  misc_feature 1..25: note = Oligonucleotide
  source 1..25: mol_type = other DNA
accacctgtgtctcccggccctgtc

SEQ ID NO: 35008 - DNA, 25 bp, synthetic construct
  misc_feature 1..25: note = Oligonucleotide
  source 1..25: mol_type = other DNA
cgtaccacctgtgtctcccggccct

SEQ ID NO: 35009 - DNA, 25 bp, synthetic construct
  misc_feature 1..25: note = Oligonucleotide
  source 1..25: mol_type = other DNA
tcccgtaccacctgtgtctcccggc

SEQ ID NO: 35010 - DNA, 25 bp, synthetic construct
  misc_feature 1..25: note = Oligonucleotide
  source 1..25: mol_type = other DNA
ccctcccgtaccacctgtgtctccc

SEQ ID NO: 35011 - DNA, 25 bp, synthetic construct
  misc_feature 1..25: note = Oligonucleotide
  source 1..25: mol_type = other DNA
ctgccctcccgtaccacctgtgtct

SEQ ID NO: 35012 - DNA, 25 bp, synthetic construct
  misc_feature 1..25: note = Oligonucleotide
  source 1..25: mol_type = other DNA
cgcctgccctcccgtaccacctgtg

SEQ ID NO: 35013 - DNA, 25 bp, synthetic construct
  misc_feature 1..25: note = Oligonucleotide
  source 1..25: mol_type = other DNA
gaccgcctgccctcccgtaccacct

SEQ ID NO: 35014 - DNA, 25 bp, synthetic construct
  misc_feature 1..25: note = Oligonucleotide
  source 1..25: mol_type = other DNA
ctggaccgcctgccctcccgtacca

SEQ ID NO: 35015 - DNA, 25 bp, synthetic construct
  misc_feature 1..25: note = Oligonucleotide
  source 1..25: mol_type = other DNA
tggctggaccgcctgccctcccgta

SEQ ID NO: 35016 - DNA, 25 bp, synthetic construct
  misc_feature 1..25: note = Oligonucleotide
  source 1..25: mol_type = other DNA
ctctggctggaccgcctgccctccc

SEQ ID NO: 35017 - DNA, 25 bp, synthetic construct
  misc_feature 1..25: note = Oligonucleotide
  source 1..25: mol_type = other DNA
accctctggctggaccgcctgccct

SEQ ID NO: 35018 - DNA, 25 bp, synthetic construct
  misc_feature 1..25: note = Oligonucleotide
  source 1..25: mol_type = other DNA
cctaccctctggctggaccgcctgc

SEQ ID NO: 35019 - DNA, 25 bp, synthetic construct
  misc_feature 1..25: note = Oligonucleotide
  source 1..25: mol_type = other DNA
cttcctaccctctggctggaccgcc

SEQ ID NO: 35020 - DNA, 25 bp, synthetic construct
  misc_feature 1..25: note = Oligonucleotide
  source 1..25: mol_type = other DNA
gtccttcctaccctctggctggacc

SEQ ID NO: 35021 - DNA, 25 bp, synthetic construct
  misc_feature 1..25: note = Oligonucleotide
  source 1..25: mol_type = other DNA
cctgtccttcctaccctctggctgg

SEQ ID NO: 35022 - DNA, 25 bp, synthetic construct
  misc_feature 1..25: note = Oligonucleotide
  source 1..25: mol_type = other DNA
ccacctgtccttcctaccctctggc

SEQ ID NO: 35023 - DNA, 25 bp, synthetic construct
  misc_feature 1..25: note = Oligonucleotide
  source 1..25: mol_type = other DNA
tacccacctgtccttcctaccctct

SEQ ID NO: 35024 - DNA, 25 bp, synthetic construct
  misc_feature 1..25: note = Oligonucleotide
  source 1..25: mol_type = other DNA
ttgtacccacctgtccttcctaccc

SEQ ID NO: 35025 - DNA, 25 bp, synthetic construct
  misc_feature 1..25: note = Oligonucleotide
  source 1..25: mol_type = other DNA
ctcttgtacccacctgtccttccta

SEQ ID NO: 35026 - DNA, 25 bp, synthetic construct
  misc_feature 1..25: note = Oligonucleotide
  source 1..25: mol_type = other DNA
ctgctcttgtacccacctgtccttc

SEQ ID NO: 35027 - DNA, 25 bp, synthetic construct
  misc_feature 1..25: note = Oligonucleotide
  source 1..25: mol_type = other DNA
gacctgctcttgtacccacctgtcc

SEQ ID NO: 35028 - DNA, 25 bp, synthetic construct
  misc_feature 1..25: note = Oligonucleotide
  source 1..25: mol_type = other DNA
tctgacctgctcttgtacccacctg

SEQ ID NO: 35029 - DNA, 25 bp, synthetic construct
  misc_feature 1..25: note = Oligonucleotide
  source 1..25: mol_type = other DNA
acctctgacctgctcttgtacccac

SEQ ID NO: 35030 - DNA, 25 bp, synthetic construct
  misc_feature 1..25: note = Oligonucleotide
  source 1..25: mol_type = other DNA
ttcacctctgacctgctcttgtacc

SEQ ID NO: 35031 - DNA, 25 bp, synthetic construct
  misc_feature 1..25: note = Oligonucleotide
  source 1..25: mol_type = other DNA
ccattcacctctgacctgctcttgt

SEQ ID NO: 35032 - DNA, 25 bp, synthetic construct
  misc_feature 1..25: note = Oligonucleotide
  source 1..25: mol_type = other DNA
cacccattcacctctgacctgctct

SEQ ID NO: 35033 - DNA, 25 bp, synthetic construct
  misc_feature 1..25: note = Oligonucleotide
  source 1..25: mol_type = other DNA
acccacccattcacctctgacctgc

SEQ ID NO: 35034 - DNA, 25 bp, synthetic construct
  misc_feature 1..25: note = Oligonucleotide
  source 1..25: mol_type = other DNA
agcacccacccattcacctctgacc

SEQ ID NO: 35035 - DNA, 25 bp, synthetic construct
  misc_feature 1..25: note = Oligonucleotide
  source 1..25: mol_type = other DNA
gccagcacccacccattcacctctg

SEQ ID NO: 35036 - DNA, 25 bp, synthetic construct
  misc_feature 1..25: note = Oligonucleotide
  source 1..25: mol_type = other DNA
cgcgccagcacccacccattcacct

SEQ ID NO: 35037 - DNA, 25 bp, synthetic construct
  misc_feature 1..25: note = Oligonucleotide
  source 1..25: mol_type = other DNA
catcgcgccagcacccacccattca

SEQ ID NO: 35038 - DNA, 25 bp, synthetic construct
  misc_feature 1..25: note = Oligonucleotide
  source 1..25: mol_type = other DNA
ccccatcgcgccagcacccacccat

SEQ ID NO: 35039 - DNA, 25 bp, synthetic construct
  misc_feature 1..25: note = Oligonucleotide
  source 1..25: mol_type = other DNA
tttccccatcgcgccagcacccacc

SEQ ID NO: 35040 - DNA, 25 bp, synthetic construct
  misc_feature 1..25: note = Oligonucleotide
  source 1..25: mol_type = other DNA
aaatttccccatcgcgccagcaccc

SEQ ID NO: 35041 - DNA, 25 bp, synthetic construct
  misc_feature 1..25: note = Oligonucleotide
  source 1..25: mol_type = other DNA
accaaatttccccatcgcgccagca

SEQ ID NO: 35042 - DNA, 25 bp, synthetic construct
  misc_feature 1..25: note = Oligonucleotide
  source 1..25: mol_type = other DNA
agcaccaaatttccccatcgcgcca

SEQ ID NO: 35043 - DNA, 25 bp, synthetic construct
  misc_feature 1..25: note = Oligonucleotide
  source 1..25: mol_type = other DNA
acaagcaccaaatttccccatcgcg

SEQ ID NO: 35044 - DNA, 25 bp, synthetic construct
  misc_feature 1..25: note = Oligonucleotide
  source 1..25: mol_type = other DNA
cccacaagcaccaaatttccccatc

SEQ ID NO: 35045 - DNA, 25 bp, synthetic construct
  misc_feature 1..25: note = Oligonucleotide
  source 1..25: mol_type = other DNA
caccccacaagcaccaaatttcccc

SEQ ID NO: 35046 - DNA, 25 bp, synthetic construct
  misc_feature 1..25: note = Oligonucleotide
  source 1..25: mol_type = other DNA
cctcaccccacaagcaccaaatttc

SEQ ID NO: 35047 - DNA, 25 bp, synthetic construct
  misc_feature 1..25: note = Oligonucleotide
  source 1..25: mol_type = other DNA
tctcctcaccccacaagcaccaaat

SEQ ID NO: 35048 - DNA, 25 bp, synthetic construct
  misc_feature 1..25: note = Oligonucleotide
  source 1..25: mol_type = other DNA
ccctctcctcaccccacaagcacca

SEQ ID NO: 35049 - DNA, 25 bp, synthetic construct
  misc_feature 1..25: note = Oligonucleotide
  source 1..25: mol_type = other DNA
ccaccctctcctcaccccacaagca

SEQ ID NO: 35050 - DNA, 25 bp, synthetic construct
  misc_feature 1..25: note = Oligonucleotide
  source 1..25: mol_type = other DNA
atgccaccctctcctcaccccacaa

SEQ ID NO: 35051 - DNA, 25 bp, synthetic construct
  misc_feature 1..25: note = Oligonucleotide
  source 1..25: mol_type = other DNA
cacatgccaccctctcctcacccca

SEQ ID NO: 35052 - DNA, 25 bp, synthetic construct
  misc_feature 1..25: note = Oligonucleotide
  source 1..25: mol_type = other DNA
ttccacatgccaccctctcctcacc

SEQ ID NO: 35053 - DNA, 25 bp, synthetic construct
  misc_feature 1..25: note = Oligonucleotide
  source 1..25: mol_type = other DNA
cccttccacatgccaccctctcctc

SEQ ID NO: 35054 - DNA, 25 bp, synthetic construct
  misc_feature 1..25: note = Oligonucleotide
  source 1..25: mol_type = other DNA
caccccttccacatgccaccctctc

SEQ ID NO: 35055 - DNA, 25 bp, synthetic construct
  misc_feature 1..25: note = Oligonucleotide
  source 1..25: mol_type = other DNA
tctcaccccttccacatgccaccct

SEQ ID NO: 35056 - DNA, 25 bp, synthetic construct
  misc_feature 1..25: note = Oligonucleotide
  source 1..25: mol_type = other DNA
acatctcaccccttccacatgccac

SEQ ID NO: 35057 - DNA, 25 bp, synthetic construct
  misc_feature 1..25: note = Oligonucleotide
  source 1..25: mol_type = other DNA
ctcacatctcaccccttccacatgc

SEQ ID NO: 35058 - DNA, 25 bp, synthetic construct
  misc_feature 1..25: note = Oligonucleotide
  source 1..25: mol_type = other DNA
cctctcacatctcaccccttccaca

SEQ ID NO: 35059 - DNA, 25 bp, synthetic construct
  misc_feature 1..25: note = Oligonucleotide
  source 1..25: mol_type = other DNA
cagcctctcacatctcaccccttcc

SEQ ID NO: 35060 - DNA, 25 bp, synthetic construct
  misc_feature 1..25: note = Oligonucleotide
  source 1..25: mol_type = other DNA
ccccagcctctcacatctcacccct

SEQ ID NO: 35061 - DNA, 25 bp, synthetic construct
  misc_feature 1..25: note = Oligonucleotide
  source 1..25: mol_type = other DNA
catccccagcctctcacatctcacc

SEQ ID NO: 35062 - DNA, 25 bp, synthetic construct
  misc_feature 1..25: note = Oligonucleotide
  source 1..25: mol_type = other DNA
gtccatccccagcctctcacatctc

SEQ ID NO: 35063 - DNA, 25 bp, synthetic construct
  misc_feature 1..25: note = Oligonucleotide
  source 1..25: mol_type = other DNA
actgtccatccccagcctctcacat

SEQ ID NO: 35064 - DNA, 25 bp, synthetic construct
  misc_feature 1..25: note = Oligonucleotide
  source 1..25: mol_type = other DNA
cccactgtccatccccagcctctca

SEQ ID NO: 35065 - DNA, 25 bp, synthetic construct
  misc_feature 1..25: note = Oligonucleotide
  source 1..25: mol_type = other DNA
caccccactgtccatccccagcctc

SEQ ID NO: 35066 - DNA, 25 bp, synthetic construct
  misc_feature 1..25: note = Oligonucleotide
  source 1..25: mol_type = other DNA
ggacaccccactgtccatccccagc

SEQ ID NO: 35067 - DNA, 25 bp, synthetic construct
  misc_feature 1..25: note = Oligonucleotide
  source 1..25: mol_type = other DNA
cctggacaccccactgtccatcccc

SEQ ID NO: 35068 - DNA, 25 bp, synthetic construct
  misc_feature 1..25: note = Oligonucleotide
  source 1..25: mol_type = other DNA
tgtcctggacaccccactgtccatc

SEQ ID NO: 35069 - DNA, 25 bp, synthetic construct
  misc_feature 1..25: note = Oligonucleotide
  source 1..25: mol_type = other DNA
atctgtcctggacaccccactgtcc

SEQ ID NO: 35070 - DNA, 25 bp, synthetic construct
  misc_feature 1..25: note = Oligonucleotide
  source 1..25: mol_type = other DNA
gtcatctgtcctggacaccccactg

SEQ ID NO: 35071 - DNA, 25 bp, synthetic construct
  misc_feature 1..25: note = Oligonucleotide
  source 1..25: mol_type = other DNA
cccgtcatctgtcctggacacccca

SEQ ID NO: 35072 - DNA, 25 bp, synthetic construct
  misc_feature 1..25: note = Oligonucleotide
  source 1..25: mol_type = other DNA
ctccccgtcatctgtcctggacacc

SEQ ID NO: 35073 - DNA, 25 bp, synthetic construct
  misc_feature 1..25: note = Oligonucleotide
  source 1..25: mol_type = other DNA
ctgctccccgtcatctgtcctggac

SEQ ID NO: 35074 - DNA, 25 bp, synthetic construct
  misc_feature 1..25: note = Oligonucleotide
  source 1..25: mol_type = other DNA
gccctgctccccgtcatctgtcctg

SEQ ID NO: 35075 - DNA, 25 bp, synthetic construct
  misc_feature 1..25: note = Oligonucleotide
  source 1..25: mol_type = other DNA
caggccctgctccccgtcatctgtc

SEQ ID NO: 35076 - DNA, 25 bp, synthetic construct
  misc_feature 1..25: note = Oligonucleotide
  source 1..25: mol_type = other DNA
ggccaggccctgctccccgtcatct

SEQ ID NO: 35077 - DNA, 25 bp, synthetic construct
  misc_feature 1..25: note = Oligonucleotide
  source 1..25: mol_type = other DNA
gtgggccaggccctgctccccgtca

SEQ ID NO: 35078 - DNA, 25 bp, synthetic construct
  misc_feature 1..25: note = Oligonucleotide
  source 1..25: mol_type = other DNA
ctggtgggccaggccctgctccccg

SEQ ID NO: 35079 - DNA, 25 bp, synthetic construct
  misc_feature 1..25: note = Oligonucleotide
  source 1..25: mol_type = other DNA
atactggtgggccaggccctgctcc

SEQ ID NO: 35080 - DNA, 25 bp, synthetic construct
  misc_feature 1..25: note = Oligonucleotide
  source 1..25: mol_type = other DNA
aacatactggtgggccaggccctgc

SEQ ID NO: 35081 - DNA, 25 bp, synthetic construct
  misc_feature 1..25: note = Oligonucleotide
  source 1..25: mol_type = other DNA
gcaaacatactggtgggccaggccc

SEQ ID NO: 35082 - DNA, 25 bp, synthetic construct
  misc_feature 1..25: note = Oligonucleotide
  source 1..25: mol_type = other DNA
catgcaaacatactggtgggccagg

SEQ ID NO: 35083 - DNA, 25 bp, synthetic construct
  misc_feature 1..25: note = Oligonucleotide
  source 1..25: mol_type = other DNA
acacatgcaaacatactggtgggcc

SEQ ID NO: 35084 - DNA, 25 bp, synthetic construct
  misc_feature 1..25: note = Oligonucleotide
  source 1..25: mol_type = other DNA
cacacacatgcaaacatactggtgg

SEQ ID NO: 35085 - DNA, 25 bp, synthetic construct
  misc_feature 1..25: note = Oligonucleotide
  source 1..25: mol_type = other DNA
atgcacacacatgcaaacatactgg

SEQ ID NO: 35086 - DNA, 25 bp, synthetic construct
  misc_feature 1..25: note = Oligonucleotide
  source 1..25: mol_type = other DNA
cacatgcacacacatgcaaacatac

SEQ ID NO: 35087 - DNA, 25 bp, synthetic construct
  misc_feature 1..25: note = Oligonucleotide
  source 1..25: mol_type = other DNA
acacacatgcacacacatgcaaaca

SEQ ID NO: 35088 - DNA, 25 bp, synthetic construct
  misc_feature 1..25: note = Oligonucleotide
  source 1..25: mol_type = other DNA
cgcacacacatgcacacacatgcaa

SEQ ID NO: 35089 - DNA, 25 bp, synthetic construct
  misc_feature 1..25: note = Oligonucleotide
  source 1..25: mol_type = other DNA
acacgcacacacatgcacacacatg

SEQ ID NO: 35090 - DNA, 25 bp, synthetic construct
  misc_feature 1..25: note = Oligonucleotide
  source 1..25: mol_type = other DNA
agcacacgcacacacatgcacacac

SEQ ID NO: 35091 - DNA, 25 bp, synthetic construct
  misc_feature 1..25: note = Oligonucleotide
  source 1..25: mol_type = other DNA
ggcagcacacgcacacacatgcaca

SEQ ID NO: 35092 - DNA, 25 bp, synthetic construct
  misc_feature 1..25: note = Oligonucleotide
  source 1..25: mol_type = other DNA
agaggcagcacacgcacacacatgc

SEQ ID NO: 35093 - DNA, 25 bp, synthetic construct
  misc_feature 1..25: note = Oligonucleotide
  source 1..25: mol_type = other DNA
accagaggcagcacacgcacacaca

SEQ ID NO: 35094 - DNA, 25 bp, synthetic construct
  misc_feature 1..25: note = Oligonucleotide
  source 1..25: mol_type = other DNA
aaaaccagaggcagcacacgcacac

SEQ ID NO: 35095 - DNA, 25 bp, synthetic construct
  misc_feature 1..25: note = Oligonucleotide
  source 1..25: mol_type = other DNA
tggaaaaccagaggcagcacacgca

SEQ ID NO: 35096 - DNA, 25 bp, synthetic construct
  misc_feature 1..25: note = Oligonucleotide
  source 1..25: mol_type = other DNA
acgtggaaaaccagaggcagcacac

SEQ ID NO: 35097 - DNA, 25 bp, synthetic construct
  misc_feature 1..25: note = Oligonucleotide
  source 1..25: mol_type = other DNA
gagacgtggaaaaccagaggcagca

SEQ ID NO: 35098 - DNA, 25 bp, synthetic construct
  misc_feature 1..25: note = Oligonucleotide
  source 1..25: mol_type = other DNA
gtggagacgtggaaaaccagaggca

SEQ ID NO: 35099 - DNA, 25 bp, synthetic construct
  misc_feature 1..25: note = Oligonucleotide
  source 1..25: mol_type = other DNA
aaagtggagacgtggaaaaccagag

SEQ ID NO: 35100 - DNA, 25 bp, synthetic construct
  misc_feature 1..25: note = Oligonucleotide
  source 1..25: mol_type = other DNA
gtcaaagtggagacgtggaaaacca

SEQ ID NO: 35101 - DNA, 25 bp, synthetic construct
  misc_feature 1..25: note = Oligonucleotide
  source 1..25: mol_type = other DNA
aaagtcaaagtggagacgtggaaaa

SEQ ID NO: 35102 - DNA, 25 bp, synthetic construct
  misc_feature 1..25: note = Oligonucleotide
  source 1..25: mol_type = other DNA
agtaaagtcaaagtggagacgtgga

SEQ ID NO: 35103 - DNA, 25 bp, synthetic construct
  misc_feature 1..25: note = Oligonucleotide
  source 1..25: mol_type = other DNA
aggagtaaagtcaaagtggagacgt

SEQ ID NO: 35104 - DNA, 25 bp, synthetic construct
  misc_feature 1..25: note = Oligonucleotide
  source 1..25: mol_type = other DNA
tgcaggagtaaagtcaaagtggaga

SEQ ID NO: 35105 - DNA, 25 bp, synthetic construct
  misc_feature 1..25: note = Oligonucleotide
  source 1..25: mol_type = other DNA
aaatgcaggagtaaagtcaaagtgg

SEQ ID NO: 35106 - DNA, 25 bp, synthetic construct
  misc_feature 1..25: note = Oligonucleotide
  source 1..25: mol_type = other DNA
atgaaatgcaggagtaaagtcaaag

SEQ ID NO: 35107 - DNA, 25 bp, synthetic construct
  misc_feature 1..25: note = Oligonucleotide
  source 1..25: mol_type = other DNA
tggatgaaatgcaggagtaaagtca

SEQ ID NO: 35108 - DNA, 25 bp, synthetic construct
  misc_feature 1..25: note = Oligonucleotide
  source 1..25: mol_type = other DNA
acttggatgaaatgcaggagtaaag

SEQ ID NO: 35109 - DNA, 25 bp, synthetic construct
  misc_feature 1..25: note = Oligonucleotide
  source 1..25: mol_type = other DNA
ctcacttggatgaaatgcaggagta

SEQ ID NO: 35110 - DNA, 25 bp, synthetic construct
  misc_feature 1..25: note = Oligonucleotide
  source 1..25: mol_type = other DNA
ctcctcacttggatgaaatgcagga

SEQ ID NO: 35111 - DNA, 25 bp, synthetic construct
  misc_feature 1..25: note = Oligonucleotide
  source 1..25: mol_type = other DNA
tctctcctcacttggatgaaatgca

SEQ ID NO: 35112 - DNA, 25 bp, synthetic construct
  misc_feature 1..25: note = Oligonucleotide
  source 1..25: mol_type = other DNA
cgctctctcctcacttggatgaaat

SEQ ID NO: 35113 - DNA, 25 bp, synthetic construct
  misc_feature 1..25: note = Oligonucleotide
  source 1..25: mol_type = other DNA
taccgctctctcctcacttggatga

SEQ ID NO: 35114 - DNA, 25 bp, synthetic construct
  misc_feature 1..25: note = Oligonucleotide
  source 1..25: mol_type = other DNA
cactaccgctctctcctcacttgga

SEQ ID NO: 35115 - DNA, 25 bp, synthetic construct
  misc_feature 1..25: note = Oligonucleotide
  source 1..25: mol_type = other DNA
cctcactaccgctctctcctcactt

SEQ ID NO: 35116 - DNA, 25 bp, synthetic construct
  misc_feature 1..25: note = Oligonucleotide
  source 1..25: mol_type = other DNA
tcacctcactaccgctctctcctca

SEQ ID NO: 35117 - DNA, 25 bp, synthetic construct
  misc_feature 1..25: note = Oligonucleotide
  source 1..25: mol_type = other DNA
tggtcacctcactaccgctctctcc

SEQ ID NO: 35118 - DNA, 25 bp, synthetic construct
  misc_feature 1..25: note = Oligonucleotide
  source 1..25: mol_type = other DNA
ccctggtcacctcactaccgctctc

SEQ ID NO: 35119 - DNA, 25 bp, synthetic construct
  misc_feature 1..25: note = Oligonucleotide
  source 1..25: mol_type = other DNA
agaccctggtcacctcactaccgct

SEQ ID NO: 35120 - DNA, 25 bp, synthetic construct
  misc_feature 1..25: note = Oligonucleotide
  source 1..25: mol_type = other DNA
agcagaccctggtcacctcactacc

SEQ ID NO: 35121 - DNA, 25 bp, synthetic construct
  misc_feature 1..25: note = Oligonucleotide
  source 1..25: mol_type = other DNA
agcagcagaccctggtcacctcact

SEQ ID NO: 35122 - DNA, 25 bp, synthetic construct
  misc_feature 1..25: note = Oligonucleotide
  source 1..25: mol_type = other DNA
gccagcagcagaccctggtcacctc

SEQ ID NO: 35123 - DNA, 25 bp, synthetic construct
  misc_feature 1..25: note = Oligonucleotide
  source 1..25: mol_type = other DNA
agagccagcagcagaccctggtcac

SEQ ID NO: 35124 - DNA, 25 bp, synthetic construct
  misc_feature 1..25: note = Oligonucleotide
  source 1..25: mol_type = other DNA
ggcagagccagcagcagaccctggt

SEQ ID NO: 35125 - DNA, 25 bp, synthetic construct
  misc_feature 1..25: note = Oligonucleotide
  source 1..25: mol_type = other DNA
cctggcagagccagcagcagaccct

SEQ ID NO: 35126 - DNA, 25 bp, synthetic construct
  misc_feature 1..25: note = Oligonucleotide
  source 1..25: mol_type = other DNA
gtgcctggcagagccagcagcagac

SEQ ID NO: 35127 - DNA, 25 bp, synthetic construct
  misc_feature 1..25: note = Oligonucleotide
  source 1..25: mol_type = other DNA
ccagtgcctggcagagccagcagca

SEQ ID NO: 35128 - DNA, 25 bp, synthetic construct
  misc_feature 1..25: note = Oligonucleotide
  source 1..25: mol_type = other DNA
cagccagtgcctggcagagccagca

SEQ ID NO: 35129 - DNA, 25 bp, synthetic construct
  misc_feature 1..25: note = Oligonucleotide
  source 1..25: mol_type = other DNA
acacagccagtgcctggcagagcca

SEQ ID NO: 35130 - DNA, 25 bp, synthetic construct
  misc_feature 1..25: note = Oligonucleotide
  source 1..25: mol_type = other DNA
ctgacacagccagtgcctggcagag

SEQ ID NO: 35131 - DNA, 25 bp, synthetic construct
  misc_feature 1..25: note = Oligonucleotide
  source 1..25: mol_type = other DNA
gagctgacacagccagtgcctggca

SEQ ID NO: 35132 - DNA, 25 bp, synthetic construct
  misc_feature 1..25: note = Oligonucleotide
  source 1..25: mol_type = other DNA
acagagctgacacagccagtgcctg

SEQ ID NO: 35133 - DNA, 25 bp, synthetic construct
  misc_feature 1..25: note = Oligonucleotide
  source 1..25: mol_type = other DNA
aacacagagctgacacagccagtgc

SEQ ID NO: 35134 - DNA, 25 bp, synthetic construct
  misc_feature 1..25: note = Oligonucleotide
  source 1..25: mol_type = other DNA
ataaacacagagctgacacagccag

SEQ ID NO: 35135 - DNA, 25 bp, synthetic construct
  misc_feature 1..25: note = Oligonucleotide
  source 1..25: mol_type = other DNA
aaaataaacacagagctgacacagc

SEQ ID NO: 35136 - DNA, 25 bp, synthetic construct
  misc_feature 1..25: note = Oligonucleotide
  source 1..25: mol_type = other DNA
ggtaaaataaacacagagctgacac

SEQ ID NO: 35137 - DNA, 25 bp, synthetic construct
  misc_feature 1..25: note = Oligonucleotide
  source 1..25: mol_type = other DNA
gagggtaaaataaacacagagctga

SEQ ID NO: 35138 - DNA, 25 bp, synthetic construct
  misc_feature 1..25: note = Oligonucleotide
  source 1..25: mol_type = other DNA
caagagggtaaaataaacacagagc

SEQ ID NO: 35139 - DNA, 25 bp, synthetic construct
  misc_feature 1..25: note = Oligonucleotide
  source 1..25: mol_type = other DNA
caccaagagggtaaaataaacacag

SEQ ID NO: 35140 - DNA, 25 bp, synthetic construct
  misc_feature 1..25: note = Oligonucleotide
  source 1..25: mol_type = other DNA
agtcaccaagagggtaaaataaaca

SEQ ID NO: 35141 - DNA, 25 bp, synthetic construct
  misc_feature 1..25: note = Oligonucleotide
  source 1..25: mol_type = other DNA
cacagtcaccaagagggtaaaataa

SEQ ID NO: 35142 - DNA, 25 bp, synthetic construct
  misc_feature 1..25: note = Oligonucleotide
  source 1..25: mol_type = other DNA
gtgcacagtcaccaagagggtaaaa

SEQ ID NO: 35143 - DNA, 25 bp, synthetic construct
  misc_feature 1..25: note = Oligonucleotide
  source 1..25: mol_type = other DNA
tgagtgcacagtcaccaagagggta

SEQ ID NO: 35144 - DNA, 25 bp, synthetic construct
  misc_feature 1..25: note = Oligonucleotide
  source 1..25: mol_type = other DNA
caatgagtgcacagtcaccaagagg

SEQ ID NO: 35145 - DNA, 25 bp, synthetic construct
  misc_feature 1..25: note = Oligonucleotide
  source 1..25: mol_type = other DNA
tgtcaatgagtgcacagtcaccaag

SEQ ID NO: 35146 - DNA, 25 bp, synthetic construct
  misc_feature 1..25: note = Oligonucleotide
  source 1..25: mol_type = other DNA
acctgtcaatgagtgcacagtcacc

SEQ ID NO: 35147 - DNA, 25 bp, synthetic construct
  misc_feature 1..25: note = Oligonucleotide
  source 1..25: mol_type = other DNA
gccacctgtcaatgagtgcacagtc

SEQ ID NO: 35148 - DNA, 25 bp, synthetic construct
  misc_feature 1..25: note = Oligonucleotide
  source 1..25: mol_type = other DNA
agggccacctgtcaatgagtgcaca

SEQ ID NO: 35149 - DNA, 25 bp, synthetic construct
  misc_feature 1..25: note = Oligonucleotide
  source 1..25: mol_type = other DNA
agcagggccacctgtcaatgagtgc

SEQ ID NO: 35150 - DNA, 25 bp, synthetic construct
  misc_feature 1..25: note = Oligonucleotide
  source 1..25: mol_type = other DNA
gtcagcagggccacctgtcaatgag

SEQ ID NO: 35151 - DNA, 25 bp, synthetic construct
  misc_feature 1..25: note = Oligonucleotide
  source 1..25: mol_type = other DNA
ggggtcagcagggccacctgtcaat

SEQ ID NO: 35152 - DNA, 25 bp, synthetic construct
  misc_feature 1..25: note = Oligonucleotide
  source 1..25: mol_type = other DNA
tgtggggtcagcagggccacctgtc

SEQ ID NO: 35153 - DNA, 25 bp, synthetic construct
  misc_feature 1..25: note = Oligonucleotide
  source 1..25: mol_type = other DNA
gcctgtggggtcagcagggccacct

SEQ ID NO: 35154 - DNA, 25 bp, synthetic construct
  misc_feature 1..25: note = Oligonucleotide
  source 1..25: mol_type = other DNA
gtggcctgtggggtcagcagggcca

SEQ ID NO: 35155 - DNA, 25 bp, synthetic construct
  misc_feature 1..25: note = Oligonucleotide
  source 1..25: mol_type = other DNA
cctgtggcctgtggggtcagcaggg

SEQ ID NO: 35156 - DNA, 25 bp, synthetic construct
  misc_feature 1..25: note = Oligonucleotide
  source 1..25: mol_type = other DNA
actcctgtggcctgtggggtcagca

SEQ ID NO: 35157 - DNA, 25 bp, synthetic construct
  misc_feature 1..25: note = Oligonucleotide
  source 1..25: mol_type = other DNA
agtactcctgtggcctgtggggtca

SEQ ID NO: 35158 - DNA, 25 bp, synthetic construct
  misc_feature 1..25: note = Oligonucleotide
  source 1..25: mol_type = other DNA
gacagtactcctgtggcctgtgggg

SEQ ID NO: 35159 - DNA, 25 bp, synthetic construct
  misc_feature 1..25: note = Oligonucleotide
  source 1..25: mol_type = other DNA
accgacagtactcctgtggcctgtg

SEQ ID NO: 35160 - DNA, 25 bp, synthetic construct
  misc_feature 1..25: note = Oligonucleotide
  source 1..25: mol_type = other DNA
cccaccgacagtactcctgtggcct

SEQ ID NO: 35161 - DNA, 25 bp, synthetic construct
  misc_feature 1..25: note = Oligonucleotide
  source 1..25: mol_type = other DNA
catcccaccgacagtactcctgtgg

SEQ ID NO: 35162 - DNA, 25 bp, synthetic construct
  misc_feature 1..25: note = Oligonucleotide
  source 1..25: mol_type = other DNA
catcatcccaccgacagtactcctg

SEQ ID NO: 35163 - DNA, 25 bp, synthetic construct
  misc_feature 1..25: note = Oligonucleotide
  source 1..25: mol_type = other DNA
ccccatcatcccaccgacagtactc

SEQ ID NO: 35164 - DNA, 25 bp, synthetic construct
  misc_feature 1..25: note = Oligonucleotide
  source 1..25: mol_type = other DNA
ctgccccatcatcccaccgacagta

SEQ ID NO: 35165 - DNA, 25 bp, synthetic construct
  misc_feature 1..25: note = Oligonucleotide
  source 1..25: mol_type = other DNA
gccctgccccatcatcccaccgaca

SEQ ID NO: 35166 - DNA, 25 bp, synthetic construct
  misc_feature 1..25: note = Oligonucleotide
  source 1..25: mol_type = other DNA
gaggccctgccccatcatcccaccg

SEQ ID NO: 35167 - DNA, 25 bp, synthetic construct
  misc_feature 1..25: note = Oligonucleotide
  source 1..25: mol_type = other DNA
ctcgaggccctgccccatcatccca

SEQ ID NO: 35168 - DNA, 25 bp, synthetic construct
  misc_feature 1..25: note = Oligonucleotide
  source 1..25: mol_type = other DNA
gcgctcgaggccctgccccatcatc

SEQ ID NO: 35169 - DNA, 25 bp, synthetic construct
  misc_feature 1..25: note = Oligonucleotide
  source 1..25: mol_type = other DNA
gccgcgctcgaggccctgccccatc

SEQ ID NO: 35170 - DNA, 25 bp, synthetic construct
  misc_feature 1..25: note = Oligonucleotide
  source 1..25: mol_type = other DNA
cctgccgcgctcgaggccctgcccc

SEQ ID NO: 35171 - DNA, 25 bp, synthetic construct
  misc_feature 1..25: note = Oligonucleotide
  source 1..25: mol_type = other DNA
cctcctgccgcgctcgaggccctgc

SEQ ID NO: 35172 - DNA, 25 bp, synthetic construct
  misc_feature 1..25: note = Oligonucleotide
  source 1..25: mol_type = other DNA
tcccctcctgccgcgctcgaggccc

SEQ ID NO: 35173 - DNA, 25 bp, synthetic construct
  misc_feature 1..25: note = Oligonucleotide
  source 1..25: mol_type = other DNA
tgctcccctcctgccgcgctcgagg

SEQ ID NO: 35174 - DNA, 25 bp, synthetic construct
  misc_feature 1..25: note = Oligonucleotide
  source 1..25: mol_type = other DNA
tcctgctcccctcctgccgcgctcg

SEQ ID NO: 35175 - DNA, 25 bp, synthetic construct
  misc_feature 1..25: note = Oligonucleotide
  source 1..25: mol_type = other DNA
cactcctgctcccctcctgccgcgc

SEQ ID NO: 35176 - DNA, 25 bp, synthetic construct
  misc_feature 1..25: note = Oligonucleotide
  source 1..25: mol_type = other DNA
acacactcctgctcccctcctgccg

SEQ ID NO: 35177 - DNA, 25 bp, synthetic construct
  misc_feature 1..25: note = Oligonucleotide
  source 1..25: mol_type = other DNA
ccaacacactcctgctcccctcctg

SEQ ID NO: 35178 - DNA, 25 bp, synthetic construct
  misc_feature 1..25: note = Oligonucleotide
  source 1..25: mol_type = other DNA
accccaacacactcctgctcccctc

SEQ ID NO: 35179 - DNA, 25 bp, synthetic construct
  misc_feature 1..25: note = Oligonucleotide
  source 1..25: mol_type = other DNA
caaaccccaacacactcctgctccc

SEQ ID NO: 35180 - DNA, 25 bp, synthetic construct
  misc_feature 1..25: note = Oligonucleotide
  source 1..25: mol_type = other DNA
catcaaaccccaacacactcctgct

SEQ ID NO: 35181 - DNA, 25 bp, synthetic construct
  misc_feature 1..25: note = Oligonucleotide
  source 1..25: mol_type = other DNA
ccccatcaaaccccaacacactcct

SEQ ID NO: 35182 - DNA, 25 bp, synthetic construct
  misc_feature 1..25: note = Oligonucleotide
  source 1..25: mol_type = other DNA
atgccccatcaaaccccaacacact

SEQ ID NO: 35183 - DNA, 25 bp, synthetic construct
  misc_feature 1..25: note = Oligonucleotide
  source 1..25: mol_type = other DNA
aacatgccccatcaaaccccaacac

SEQ ID NO: 35184 - DNA, 25 bp, synthetic construct
  misc_feature 1..25: note = Oligonucleotide
  source 1..25: mol_type = other DNA
cagaacatgccccatcaaaccccaa

SEQ ID NO: 35185 - DNA, 25 bp, synthetic construct
  misc_feature 1..25: note = Oligonucleotide
  source 1..25: mol_type = other DNA
gcccagaacatgccccatcaaaccc

SEQ ID NO: 35186 - DNA, 25 bp, synthetic construct
  misc_feature 1..25: note = Oligonucleotide
  source 1..25: mol_type = other DNA
tgtgcccagaacatgccccatcaaa

SEQ ID NO: 35187 - DNA, 25 bp, synthetic construct
  misc_feature 1..25: note = Oligonucleotide
  source 1..25: mol_type = other DNA
gcttgtgcccagaacatgccccatc

SEQ ID NO: 35188 - DNA, 25 bp, synthetic construct
  misc_feature 1..25: note = Oligonucleotide
  source 1..25: mol_type = other DNA
agggcttgtgcccagaacatgcccc

SEQ ID NO: 35189 - DNA, 25 bp, synthetic construct
  misc_feature 1..25: note = Oligonucleotide
  source 1..25: mol_type = other DNA
accagggcttgtgcccagaacatgc

SEQ ID NO: 35190 - DNA, 25 bp, synthetic construct
  misc_feature 1..25: note = Oligonucleotide
  source 1..25: mol_type = other DNA
tcaaccagggcttgtgcccagaaca

SEQ ID NO: 35191 - DNA, 25 bp, synthetic construct
  misc_feature 1..25: note = Oligonucleotide
  source 1..25: mol_type = other DNA
tggtcaaccagggcttgtgcccaga

SEQ ID NO: 35192 - DNA, 25 bp, synthetic construct
  misc_feature 1..25: note = Oligonucleotide
  source 1..25: mol_type = other DNA
tgatggtcaaccagggcttgtgccc

SEQ ID NO: 35193 - DNA, 25 bp, synthetic construct
  misc_feature 1..25: note = Oligonucleotide
  source 1..25: mol_type = other DNA
tgttgatggtcaaccagggcttgtg

SEQ ID NO: 35194 - DNA, 25 bp, synthetic construct
  misc_feature 1..25: note = Oligonucleotide
  source 1..25: mol_type = other DNA
ggctgttgatggtcaaccagggctt

SEQ ID NO: 35195 - DNA, 25 bp, synthetic construct
  misc_feature 1..25: note = Oligonucleotide
  source 1..25: mol_type = other DNA
agaggctgttgatggtcaaccaggg

SEQ ID NO: 35196 - DNA, 25 bp, synthetic construct
  misc_feature 1..25: note = Oligonucleotide
  source 1..25: mol_type = other DNA
tgaagaggctgttgatggtcaacca

SEQ ID NO: 35197 - DNA, 25 bp, synthetic construct
  misc_feature 1..25: note = Oligonucleotide
  source 1..25: mol_type = other DNA
ccatgaagaggctgttgatggtcaa

SEQ ID NO: 35198 - DNA, 25 bp, synthetic construct
  misc_feature 1..25: note = Oligonucleotide
  source 1..25: mol_type = other DNA
tgcccatgaagaggctgttgatggt

SEQ ID NO: 35199 - DNA, 25 bp, synthetic construct
  misc_feature 1..25: note = Oligonucleotide
  source 1..25: mol_type = other DNA
acctgcccatgaagaggctgttgat

SEQ ID NO: 35200 - DNA, 25 bp, synthetic construct
  misc_feature 1..25: note = Oligonucleotide
  source 1..25: mol_type = other DNA
aagacctgcccatgaagaggctgtt

SEQ ID NO: 35201 - DNA, 25 bp, synthetic construct
  misc_feature 1..25: note = Oligonucleotide
  source 1..25: mol_type = other DNA
tataagacctgcccatgaagaggct

SEQ ID NO: 35202 - DNA, 25 bp, synthetic construct
  misc_feature 1..25: note = Oligonucleotide
  source 1..25: mol_type = other DNA
atatataagacctgcccatgaagag

SEQ ID NO: 35203 - DNA, 25 bp, synthetic construct
  misc_feature 1..25: note = Oligonucleotide
  source 1..25: mol_type = other DNA
cacatatataagacctgcccatgaa

SEQ ID NO: 35204 - DNA, 25 bp, synthetic construct
  misc_feature 1..25: note = Oligonucleotide
  source 1..25: mol_type = other DNA
ggacacatatataagacctgcccat

SEQ ID NO: 35205 - DNA, 25 bp, synthetic construct
  misc_feature 1..25: note = Oligonucleotide
  source 1..25: mol_type = other DNA
aatggacacatatataagacctgcc

SEQ ID NO: 35206 - DNA, 25 bp, synthetic construct
  misc_feature 1..25: note = Oligonucleotide
  source 1..25: mol_type = other DNA
gttaatggacacatatataagacct

SEQ ID NO: 35207 - DNA, 25 bp, synthetic construct
  misc_feature 1..25: note = Oligonucleotide
  source 1..25: mol_type = other DNA
gttgttaatggacacatatataaga

SEQ ID NO: 35208 - DNA, 25 bp, synthetic construct
  misc_feature 1..25: note = Oligonucleotide
  source 1..25: mol_type = other DNA
aaggttgttaatggacacatatata

SEQ ID NO: 35209 - DNA, 25 bp, synthetic construct
  misc_feature 1..25: note = Oligonucleotide
  source 1..25: mol_type = other DNA
gacaaggttgttaatggacacatat

SEQ ID NO: 35210 - DNA, 25 bp, synthetic construct
  misc_feature 1..25: note = Oligonucleotide
  source 1..25: mol_type = other DNA
catgacaaggttgttaatggacaca

SEQ ID NO: 35211 - DNA, 25 bp, synthetic construct
  misc_feature 1..25: note = Oligonucleotide
  source 1..25: mol_type = other DNA
gcacatgacaaggttgttaatggac

SEQ ID NO: 35212 - DNA, 25 bp, synthetic construct
  misc_feature 1..25: note = Oligonucleotide
  source 1..25: mol_type = other DNA
cgtgcacatgacaaggttgttaatg

SEQ ID NO: 35213 - DNA, 25 bp, synthetic construct
  misc_feature 1..25: note = Oligonucleotide
  source 1..25: mol_type = other DNA
ggacgtgcacatgacaaggttgtta

SEQ ID NO: 35214 - DNA, 25 bp, synthetic construct
  misc_feature 1..25: note = Oligonucleotide
  source 1..25: mol_type = other DNA
tctggacgtgcacatgacaaggttg

SEQ ID NO: 35215 - DNA, 25 bp, synthetic construct
  misc_feature 1..25: note = Oligonucleotide
  source 1..25: mol_type = other DNA
atatctggacgtgcacatgacaagg

SEQ ID NO: 35216 - DNA, 25 bp, synthetic construct
  misc_feature 1..25: note = Oligonucleotide
  source 1..25: mol_type = other DNA
agtatatctggacgtgcacatgaca

SEQ ID NO: 35217 - DNA, 25 bp, synthetic construct
  misc_feature 1..25: note = Oligonucleotide
  source 1..25: mol_type = other DNA
tcaagtatatctggacgtgcacatg

SEQ ID NO: 35218 - DNA, 25 bp, synthetic construct
  misc_feature 1..25: note = Oligonucleotide
  source 1..25: mol_type = other DNA
tgatcaagtatatctggacgtgcac

SEQ ID NO: 35219 - DNA, 25 bp, synthetic construct
  misc_feature 1..25: note = Oligonucleotide
  source 1..25: mol_type = other DNA
acatgatcaagtatatctggacgtg

SEQ ID NO: 35220 - DNA, 25 bp, synthetic construct
  misc_feature 1..25: note = Oligonucleotide
  source 1..25: mol_type = other DNA
aggacatgatcaagtatatctggac

SEQ ID NO: 35221 - DNA, 25 bp, synthetic construct
  misc_feature 1..25: note = Oligonucleotide
  source 1..25: mol_type = other DNA
gtcaggacatgatcaagtatatctg

SEQ ID NO: 35222 - DNA, 25 bp, synthetic construct
  misc_feature 1..25: note = Oligonucleotide
  source 1..25: mol_type = other DNA
cacgtcaggacatgatcaagtatat

SEQ ID NO: 35223 - DNA, 25 bp, synthetic construct
  misc_feature 1..25: note = Oligonucleotide
  source 1..25: mol_type = other DNA
tgtcacgtcaggacatgatcaagta

SEQ ID NO: 35224 - DNA, 25 bp, synthetic construct
  misc_feature 1..25: note = Oligonucleotide
  source 1..25: mol_type = other DNA
gactgtcacgtcaggacatgatcaa

SEQ ID NO: 35225 - DNA, 25 bp, synthetic construct
  misc_feature 1..25: note = Oligonucleotide
  source 1..25: mol_type = other DNA
actgactgtcacgtcaggacatgat

SEQ ID NO: 35226 - DNA, 25 bp, synthetic construct
  misc_feature 1..25: note = Oligonucleotide
  source 1..25: mol_type = other DNA
gctactgactgtcacgtcaggacat

SEQ ID NO: 35227 - DNA, 25 bp, synthetic construct
  misc_feature 1..25: note = Oligonucleotide
  source 1..25: mol_type = other DNA
gaggctactgactgtcacgtcagga

SEQ ID NO: 35228 - DNA, 25 bp, synthetic construct
  misc_feature 1..25: note = Oligonucleotide
  source 1..25: mol_type = other DNA
gaagaggctactgactgtcacgtca

SEQ ID NO: 35229 - DNA, 25 bp, synthetic construct
  misc_feature 1..25: note = Oligonucleotide
  source 1..25: mol_type = other DNA
catgaagaggctactgactgtcacg

SEQ ID NO: 35230 - DNA, 25 bp, synthetic construct
  misc_feature 1..25: note = Oligonucleotide
  source 1..25: mol_type = other DNA
tcccatgaagaggctactgactgtc

SEQ ID NO: 35231 - DNA, 25 bp, synthetic construct
  misc_feature 1..25: note = Oligonucleotide
  source 1..25: mol_type = other DNA
cagtcccatgaagaggctactgact

SEQ ID NO: 35232 - DNA, 25 bp, synthetic construct
  misc_feature 1..25: note = Oligonucleotide
  source 1..25: mol_type = other DNA
ggacagtcccatgaagaggctactg

SEQ ID NO: 35233 - DNA, 25 bp, synthetic construct
  misc_feature 1..25: note = Oligonucleotide
  source 1..25: mol_type = other DNA
atgggacagtcccatgaagaggcta

SEQ ID NO: 35234 - DNA, 25 bp, synthetic construct
  misc_feature 1..25: note = Oligonucleotide
  source 1..25: mol_type = other DNA
gtaatgggacagtcccatgaagagg

SEQ ID NO: 35235 - DNA, 25 bp, synthetic construct
  misc_feature 1..25: note = Oligonucleotide
  source 1..25: mol_type = other DNA
cacgtaatgggacagtcccatgaag

SEQ ID NO: 35236 - DNA, 25 bp, synthetic construct
  misc_feature 1..25: note = Oligonucleotide
  source 1..25: mol_type = other DNA
tcacacgtaatgggacagtcccatg

SEQ ID NO: 35237 - DNA, 25 bp, synthetic construct
  misc_feature 1..25: note = Oligonucleotide
  source 1..25: mol_type = other DNA
cggtcacacgtaatgggacagtccc

SEQ ID NO: 35238 - DNA, 25 bp, synthetic construct
  misc_feature 1..25: note = Oligonucleotide
  source 1..25: mol_type = other DNA
caacggtcacacgtaatgggacagt

SEQ ID NO: 35239 - DNA, 25 bp, synthetic construct
  misc_feature 1..25: note = Oligonucleotide
  source 1..25: mol_type = other DNA
ggacaacggtcacacgtaatgggac

SEQ ID NO: 35240 - DNA, 25 bp, synthetic construct
  misc_feature 1..25: note = Oligonucleotide
  source 1..25: mol_type = other DNA
tgaggacaacggtcacacgtaatgg

SEQ ID NO: 35241 - DNA, 25 bp, synthetic construct
  misc_feature 1..25: note = Oligonucleotide
  source 1..25: mol_type = other DNA
cagtgaggacaacggtcacacgtaa

SEQ ID NO: 35242 - DNA, 25 bp, synthetic construct
  misc_feature 1..25: note = Oligonucleotide
  source 1..25: mol_type = other DNA
ccacagtgaggacaacggtcacacg

SEQ ID NO: 35243 - DNA, 25 bp, synthetic construct
  misc_feature 1..25: note = Oligonucleotide
  source 1..25: mol_type = other DNA
tacccacagtgaggacaacggtcac

SEQ ID NO: 35244 - DNA, 25 bp, synthetic construct
  misc_feature 1..25: note = Oligonucleotide
  source 1..25: mol_type = other DNA
acatacccacagtgaggacaacggt

SEQ ID NO: 35245 - DNA, 25 bp, synthetic construct
  misc_feature 1..25: note = Oligonucleotide
  source 1..25: mol_type = other DNA
agcacatacccacagtgaggacaac

SEQ ID NO: 35246 - DNA, 25 bp, synthetic construct
  misc_feature 1..25: note = Oligonucleotide
  source 1..25: mol_type = other DNA
tatagcacatacccacagtgaggac

SEQ ID NO: 35247 - DNA, 25 bp, synthetic construct
  misc_feature 1..25: note = Oligonucleotide
  source 1..25: mol_type = other DNA
atgtatagcacatacccacagtgag

SEQ ID NO: 35248 - DNA, 25 bp, synthetic construct
  misc_feature 1..25: note = Oligonucleotide
  source 1..25: mol_type = other DNA
cacatgtatagcacatacccacagt

SEQ ID NO: 35249 - DNA, 25 bp, synthetic construct
  misc_feature 1..25: note = Oligonucleotide
  source 1..25: mol_type = other DNA
ggccacatgtatagcacatacccac

SEQ ID NO: 35250 - DNA, 25 bp, synthetic construct
  misc_feature 1..25: note = Oligonucleotide
  source 1..25: mol_type = other DNA
gatggccacatgtatagcacatacc

SEQ ID NO: 35251 - DNA, 25 bp, synthetic construct
  misc_feature 1..25: note = Oligonucleotide
  source 1..25: mol_type = other DNA
gttgatggccacatgtatagcacat

SEQ ID NO: 35252 - DNA, 25 bp, synthetic construct
  misc_feature 1..25: note = Oligonucleotide
  source 1..25: mol_type = other DNA
gctgttgatggccacatgtatagca

SEQ ID NO: 35253 - DNA, 25 bp, synthetic construct
  misc_feature 1..25: note = Oligonucleotide
  source 1..25: mol_type = other DNA
gaggctgttgatggccacatgtata

SEQ ID NO: 35254 - DNA, 25 bp, synthetic construct
  misc_feature 1..25: note = Oligonucleotide
  source 1..25: mol_type = other DNA
gacgaggctgttgatggccacatgt

SEQ ID NO: 35255 - DNA, 25 bp, synthetic construct
  misc_feature 1..25: note = Oligonucleotide
  source 1..25: mol_type = other DNA
catgacgaggctgttgatggccaca

SEQ ID NO: 35256 - DNA, 25 bp, synthetic construct
  misc_feature 1..25: note = Oligonucleotide
  source 1..25: mol_type = other DNA
gcccatgacgaggctgttgatggcc

SEQ ID NO: 35257 - DNA, 25 bp, synthetic construct
  misc_feature 1..25: note = Oligonucleotide
  source 1..25: mol_type = other DNA
catgcccatgacgaggctgttgatg

SEQ ID NO: 35258 - DNA, 25 bp, synthetic construct
  misc_feature 1..25: note = Oligonucleotide
  source 1..25: mol_type = other DNA
ggacatgcccatgacgaggctgttg

SEQ ID NO: 35259 - DNA, 25 bp, synthetic construct
  misc_feature 1..25: note = Oligonucleotide
  source 1..25: mol_type = other DNA
gtgggacatgcccatgacgaggctg

SEQ ID NO: 35260 - DNA, 25 bp, synthetic construct
  misc_feature 1..25: note = Oligonucleotide
  source 1..25: mol_type = other DNA
acagtgggacatgcccatgacgagg

SEQ ID NO: 35261 - DNA, 25 bp, synthetic construct
  misc_feature 1..25: note = Oligonucleotide
  source 1..25: mol_type = other DNA
cgtacagtgggacatgcccatgacg

SEQ ID NO: 35262 - DNA, 25 bp, synthetic construct
  misc_feature 1..25: note = Oligonucleotide
  source 1..25: mol_type = other DNA
tcacgtacagtgggacatgcccatg

SEQ ID NO: 35263 - DNA, 25 bp, synthetic construct
  misc_feature 1..25: note = Oligonucleotide
  source 1..25: mol_type = other DNA
ctgtcacgtacagtgggacatgccc

SEQ ID NO: 35264 - DNA, 25 bp, synthetic construct
  misc_feature 1..25: note = Oligonucleotide
  source 1..25: mol_type = other DNA
caactgtcacgtacagtgggacatg

SEQ ID NO: 35265 - DNA, 25 bp, synthetic construct
  misc_feature 1..25: note = Oligonucleotide
  source 1..25: mol_type = other DNA
tgtcaactgtcacgtacagtgggac

SEQ ID NO: 35266 - DNA, 25 bp, synthetic construct
  misc_feature 1..25: note = Oligonucleotide
  source 1..25: mol_type = other DNA
gcctgtcaactgtcacgtacagtgg

SEQ ID NO: 35267 - DNA, 25 bp, synthetic construct
  misc_feature 1..25: note = Oligonucleotide
  source 1..25: mol_type = other DNA
agagcctgtcaactgtcacgtacag

SEQ ID NO: 35268 - DNA, 25 bp, synthetic construct
  misc_feature 1..25: note = Oligonucleotide
  source 1..25: mol_type = other DNA
gaaagagcctgtcaactgtcacgta

SEQ ID NO: 35269 - DNA, 25 bp, synthetic construct
  misc_feature 1..25: note = Oligonucleotide
  source 1..25: mol_type = other DNA
aaagaaagagcctgtcaactgtcac

SEQ ID NO: 35270 - DNA, 25 bp, synthetic construct
  misc_feature 1..25: note = Oligonucleotide
  source 1..25: mol_type = other DNA
aagaaagaaagagcctgtcaactgt

SEQ ID NO: 35271 - DNA, 25 bp, synthetic construct
  misc_feature 1..25: note = Oligonucleotide
  source 1..25: mol_type = other DNA
aaaaagaaagaaagagcctgtcaac

SEQ ID NO: 35272 - DNA, 25 bp, synthetic construct
  misc_feature 1..25: note = Oligonucleotide
  source 1..25: mol_type = other DNA
aaaaaaaagaaagaaagagcctgtc

SEQ ID NO: 35273 - DNA, 25 bp, synthetic construct
  misc_feature 1..25: note = Oligonucleotide
  source 1..25: mol_type = other DNA
aaaaaaaaaaagaaagaaagagcct

SEQ ID NO: 35274 - DNA, 25 bp, synthetic construct
  misc_feature 1..25: note = Oligonucleotide
  source 1..25: mol_type = other DNA
aagaaaaaaaaaaagaaagaaagag

SEQ ID NO: 35275 - DNA, 25 bp, synthetic construct
  misc_feature 1..25: note = Oligonucleotide
  source 1..25: mol_type = other DNA
aaaaagaaaaaaaaaaagaaagaaa

SEQ ID NO: 35276 - DNA, 25 bp, synthetic construct
  misc_feature 1..25: note = Oligonucleotide
  source 1..25: mol_type = other DNA
aaaaaaaagaaaaaaaaaaagaaag

SEQ ID NO: 35277 - DNA, 25 bp, synthetic construct
  misc_feature 1..25: note = Oligonucleotide
  source 1..25: mol_type = other DNA
aaaaaaaaaaagaaaaaaaaaaaga

SEQ ID NO: 35278 - DNA, 25 bp, synthetic construct
  misc_feature 1..25: note = Oligonucleotide
  source 1..25: mol_type = other DNA
aaaaaaaaaaaaaagaaaaaaaaaa

SEQ ID NO: 35279 - DNA, 25 bp, synthetic construct
  misc_feature 1..25: note = Oligonucleotide
  source 1..25: mol_type = other DNA
tcaaaaaaaaaaaaaaagaaaaaaa

SEQ ID NO: 35280 - DNA, 25 bp, synthetic construct
  misc_feature 1..25: note = Oligonucleotide
  source 1..25: mol_type = other DNA
gtctcaaaaaaaaaaaaaaagaaaa

SEQ ID NO: 35281 - DNA, 25 bp, synthetic construct
  misc_feature 1..25: note = Oligonucleotide
  source 1..25: mol_type = other DNA
actgtctcaaaaaaaaaaaaaaaga

SEQ ID NO: 35282 - DNA, 25 bp, synthetic construct
  misc_feature 1..25: note = Oligonucleotide
  source 1..25: mol_type = other DNA
gaaactgtctcaaaaaaaaaaaaaa

SEQ ID NO: 35283 - DNA, 25 bp, synthetic construct
  misc_feature 1..25: note = Oligonucleotide
  source 1..25: mol_type = other DNA
agtgaaactgtctcaaaaaaaaaaa

SEQ ID NO: 35284 - DNA, 25 bp, synthetic construct
  misc_feature 1..25: note = Oligonucleotide
  source 1..25: mol_type = other DNA
aagagtgaaactgtctcaaaaaaaa

SEQ ID NO: 35285 - DNA, 25 bp, synthetic construct
  misc_feature 1..25: note = Oligonucleotide
  source 1..25: mol_type = other DNA
aacaagagtgaaactgtctcaaaaa

SEQ ID NO: 35286 - DNA, 25 bp, synthetic construct
  misc_feature 1..25: note = Oligonucleotide
  source 1..25: mol_type = other DNA
ggcaacaagagtgaaactgtctcaa

SEQ ID NO: 35287 - DNA, 25 bp, synthetic construct
  misc_feature 1..25: note = Oligonucleotide
  source 1..25: mol_type = other DNA
ctgggcaacaagagtgaaactgtct

SEQ ID NO: 35288 - DNA, 25 bp, synthetic construct
  misc_feature 1..25: note = Oligonucleotide
  source 1..25: mol_type = other DNA
agcctgggcaacaagagtgaaactg

SEQ ID NO: 35289 - DNA, 25 bp, synthetic construct
  misc_feature 1..25: note = Oligonucleotide
  source 1..25: mol_type = other DNA
tccagcctgggcaacaagagtgaaa

SEQ ID NO: 35290 - DNA, 25 bp, synthetic construct
  misc_feature 1..25: note = Oligonucleotide
  source 1..25: mol_type = other DNA
cactccagcctgggcaacaagagtg

SEQ ID NO: 35291 - DNA, 25 bp, synthetic construct
  misc_feature 1..25: note = Oligonucleotide
  source 1..25: mol_type = other DNA
ttgcactccagcctgggcaacaaga

SEQ ID NO: 35292 - DNA, 25 bp, synthetic construct
  misc_feature 1..25: note = Oligonucleotide
  source 1..25: mol_type = other DNA
tcattgcactccagcctgggcaaca

SEQ ID NO: 35293 - DNA, 25 bp, synthetic construct
  misc_feature 1..25: note = Oligonucleotide
  source 1..25: mol_type = other DNA
gtgtcattgcactccagcctgggca

SEQ ID NO: 35294 - DNA, 25 bp, synthetic construct
  misc_feature 1..25: note = Oligonucleotide
  source 1..25: mol_type = other DNA
aacgtgtcattgcactccagcctgg

SEQ ID NO: 35295 - DNA, 25 bp, synthetic construct
  misc_feature 1..25: note = Oligonucleotide
  source 1..25: mol_type = other DNA
gagaacgtgtcattgcactccagcc

SEQ ID NO: 35296 - DNA, 25 bp, synthetic construct
  misc_feature 1..25: note = Oligonucleotide
  source 1..25: mol_type = other DNA
gccgagaacgtgtcattgcactcca

SEQ ID NO: 35297 - DNA, 25 bp, synthetic construct
  misc_feature 1..25: note = Oligonucleotide
  source 1..25: mol_type = other DNA
tgagccgagaacgtgtcattgcact

SEQ ID NO: 35298 - DNA, 25 bp, synthetic construct
  misc_feature 1..25: note = Oligonucleotide
  source 1..25: mol_type = other DNA
cagtgagccgagaacgtgtcattgc

SEQ ID NO: 35299 - DNA, 25 bp, synthetic construct
  misc_feature 1..25: note = Oligonucleotide
  source 1..25: mol_type = other DNA
ttgcagtgagccgagaacgtgtcat

SEQ ID NO: 35300 - DNA, 25 bp, synthetic construct
  misc_feature 1..25: note = Oligonucleotide
  source 1..25: mol_type = other DNA
aggttgcagtgagccgagaacgtgt

SEQ ID NO: 35301 - DNA, 25 bp, synthetic construct
  misc_feature 1..25: note = Oligonucleotide
  source 1..25: mol_type = other DNA
tggaggttgcagtgagccgagaacg

SEQ ID NO: 35302 - DNA, 25 bp, synthetic construct
  misc_feature 1..25: note = Oligonucleotide
  source 1..25: mol_type = other DNA
aagtggaggttgcagtgagccgaga

SEQ ID NO: 35303 - DNA, 25 bp, synthetic construct
  misc_feature 1..25: note = Oligonucleotide
  source 1..25: mol_type = other DNA
aagaagtggaggttgcagtgagccg

SEQ ID NO: 35304 - DNA, 25 bp, synthetic construct
  misc_feature 1..25: note = Oligonucleotide
  source 1..25: mol_type = other DNA
cccaagaagtggaggttgcagtgag

SEQ ID NO: 35305 - DNA, 25 bp, synthetic construct
  misc_feature 1..25: note = Oligonucleotide
  source 1..25: mol_type = other DNA
gaacccaagaagtggaggttgcagt

SEQ ID NO: 35306 - DNA, 25 bp, synthetic construct
  misc_feature 1..25: note = Oligonucleotide
  source 1..25: mol_type = other DNA
cttgaacccaagaagtggaggttgc

SEQ ID NO: 35307 - DNA, 25 bp, synthetic construct
  misc_feature 1..25: note = Oligonucleotide
  source 1..25: mol_type = other DNA
tcacttgaacccaagaagtggaggt

SEQ ID NO: 35308 - DNA, 25 bp, synthetic construct
  misc_feature 1..25: note = Oligonucleotide
  source 1..25: mol_type = other DNA
gaatcacttgaacccaagaagtgga

SEQ ID NO: 35309 - DNA, 25 bp, synthetic construct
  misc_feature 1..25: note = Oligonucleotide
  source 1..25: mol_type = other DNA
ggagaatcacttgaacccaagaagt

SEQ ID NO: 35310 - DNA, 25 bp, synthetic construct
  misc_feature 1..25: note = Oligonucleotide
  source 1..25: mol_type = other DNA
gcaggagaatcacttgaacccaaga

SEQ ID NO: 35311 - DNA, 25 bp, synthetic construct
  misc_feature 1..25: note = Oligonucleotide
  source 1..25: mol_type = other DNA
gaggcaggagaatcacttgaaccca

SEQ ID NO: 35312 - DNA, 25 bp, synthetic construct
  misc_feature 1..25: note = Oligonucleotide
  source 1..25: mol_type = other DNA
gctgaggcaggagaatcacttgaac

SEQ ID NO: 35313 - DNA, 25 bp, synthetic construct
  misc_feature 1..25: note = Oligonucleotide
  source 1..25: mol_type = other DNA
gaggctgaggcaggagaatcacttg

SEQ ID NO: 35314 - DNA, 25 bp, synthetic construct
  misc_feature 1..25: note = Oligonucleotide
  source 1..25: mol_type = other DNA
tgggaggctgaggcaggagaatcac

SEQ ID NO: 35315 - DNA, 25 bp, synthetic construct
  misc_feature 1..25: note = Oligonucleotide
  source 1..25: mol_type = other DNA
acttgggaggctgaggcaggagaat

SEQ ID NO: 35316 - DNA, 25 bp, synthetic construct
  misc_feature 1..25: note = Oligonucleotide
  source 1..25: mol_type = other DNA
gctacttgggaggctgaggcaggag

SEQ ID NO: 35317 - DNA, 25 bp, synthetic construct
  misc_feature 1..25: note = Oligonucleotide
  source 1..25: mol_type = other DNA
ccagctacttgggaggctgaggcag

SEQ ID NO: 35318 - DNA, 25 bp, synthetic construct
  misc_feature 1..25: note = Oligonucleotide
  source 1..25: mol_type = other DNA
atcccagctacttgggaggctgagg

SEQ ID NO: 35319 - DNA, 25 bp, synthetic construct
  misc_feature 1..25: note = Oligonucleotide
  source 1..25: mol_type = other DNA
gtaatcccagctacttgggaggctg

SEQ ID NO: 35320 - DNA, 25 bp, synthetic construct
  misc_feature 1..25: note = Oligonucleotide
  source 1..25: mol_type = other DNA
cctgtaatcccagctacttgggagg

SEQ ID NO: 35321 - DNA, 25 bp, synthetic construct
  misc_feature 1..25: note = Oligonucleotide
  source 1..25: mol_type = other DNA
gtgcctgtaatcccagctacttggg

SEQ ID NO: 35322 - DNA, 25 bp, synthetic construct
  misc_feature 1..25: note = Oligonucleotide
  source 1..25: mol_type = other DNA
cgggtgcctgtaatcccagctactt

SEQ ID NO: 35323 - DNA, 25 bp, synthetic construct
  misc_feature 1..25: note = Oligonucleotide
  source 1..25: mol_type = other DNA
tggcgggtgcctgtaatcccagcta

SEQ ID NO: 35324 - DNA, 25 bp, synthetic construct
  misc_feature 1..25: note = Oligonucleotide
  source 1..25: mol_type = other DNA
tggtggcgggtgcctgtaatcccag

SEQ ID NO: 35325 - DNA, 25 bp, synthetic construct
  misc_feature 1..25: note = Oligonucleotide
  source 1..25: mol_type = other DNA
gcatggtggcgggtgcctgtaatcc

SEQ ID NO: 35326 - DNA, 25 bp, synthetic construct
  misc_feature 1..25: note = Oligonucleotide
  source 1..25: mol_type = other DNA
cgtgcatggtggcgggtgcctgtaa

SEQ ID NO: 35327 - DNA, 25 bp, synthetic construct
  misc_feature 1..25: note = Oligonucleotide
  source 1..25: mol_type = other DNA
agccgtgcatggtggcgggtgcctg

SEQ ID NO: 35328 - DNA, 25 bp, synthetic construct
  misc_feature 1..25: note = Oligonucleotide
  source 1..25: mol_type = other DNA
attagccgtgcatggtggcgggtgc

SEQ ID NO: 35329 - DNA, 25 bp, synthetic construct
  misc_feature 1..25: note = Oligonucleotide
  source 1..25: mol_type = other DNA
aaaattagccgtgcatggtggcggg

SEQ ID NO: 35330 - DNA, 25 bp, synthetic construct
  misc_feature 1..25: note = Oligonucleotide
  source 1..25: mol_type = other DNA
aaaaaaattagccgtgcatggtggc

SEQ ID NO: 35331 - DNA, 25 bp, synthetic construct
  misc_feature 1..25: note = Oligonucleotide
  source 1..25: mol_type = other DNA
aaaaaaaaaattagccgtgcatggt

SEQ ID NO: 35332 - DNA, 25 bp, synthetic construct
  misc_feature 1..25: note = Oligonucleotide
  source 1..25: mol_type = other DNA
aaaaaaaaaaaaattagccgtgcat

SEQ ID NO: 35333 - DNA, 25 bp, synthetic construct
  misc_feature 1..25: note = Oligonucleotide
  source 1..25: mol_type = other DNA
aaaaaaaaaaaaaaaattagccgtg

SEQ ID NO: 35334 - DNA, 25 bp, synthetic construct
  misc_feature 1..25: note = Oligonucleotide
  source 1..25: mol_type = other DNA
aaaaaaaaaaaaaaaaaaattagcc

SEQ ID NO: 35335 - DNA, 25 bp, synthetic construct
  misc_feature 1..25: note = Oligonucleotide
  source 1..25: mol_type = other DNA
tacaaaaaaaaaaaaaaaaaaatta

SEQ ID NO: 35336 - DNA, 25 bp, synthetic construct
  misc_feature 1..25: note = Oligonucleotide
  source 1..25: mol_type = other DNA
aaatacaaaaaaaaaaaaaaaaaaa

SEQ ID NO: 35337 - DNA, 25 bp, synthetic construct
  misc_feature 1..25: note = Oligonucleotide
  source 1..25: mol_type = other DNA
taaaaatacaaaaaaaaaaaaaaaa

SEQ ID NO: 35338 - DNA, 25 bp, synthetic construct
  misc_feature 1..25: note = Oligonucleotide
  source 1..25: mol_type = other DNA
tactaaaaatacaaaaaaaaaaaaa

SEQ ID NO: 35339 - DNA, 25 bp, synthetic construct
  misc_feature 1..25: note = Oligonucleotide
  source 1..25: mol_type = other DNA
ctctactaaaaatacaaaaaaaaaa

SEQ ID NO: 35340 - DNA, 25 bp, synthetic construct
  misc_feature 1..25: note = Oligonucleotide
  source 1..25: mol_type = other DNA
cgcctctactaaaaatacaaaaaaa

SEQ ID NO: 35341 - DNA, 25 bp, synthetic construct
  misc_feature 1..25: note = Oligonucleotide
  source 1..25: mol_type = other DNA
ccccgcctctactaaaaatacaaaa

SEQ ID NO: 35342 - DNA, 25 bp, synthetic construct
  misc_feature 1..25: note = Oligonucleotide
  source 1..25: mol_type = other DNA
acaccccgcctctactaaaaataca

SEQ ID NO: 35343 - DNA, 25 bp, synthetic construct
  misc_feature 1..25: note = Oligonucleotide
  source 1..25: mol_type = other DNA
gtgacaccccgcctctactaaaaat

SEQ ID NO: 35344 - DNA, 25 bp, synthetic construct
  misc_feature 1..25: note = Oligonucleotide
  source 1..25: mol_type = other DNA
atggtgacaccccgcctctactaaa

SEQ ID NO: 35345 - DNA, 25 bp, synthetic construct
  misc_feature 1..25: note = Oligonucleotide
  source 1..25: mol_type = other DNA
aacatggtgacaccccgcctctact

SEQ ID NO: 35346 - DNA, 25 bp, synthetic construct
  misc_feature 1..25: note = Oligonucleotide
  source 1..25: mol_type = other DNA
gccaacatggtgacaccccgcctct

SEQ ID NO: 35347 - DNA, 25 bp, synthetic construct
  misc_feature 1..25: note = Oligonucleotide
  source 1..25: mol_type = other DNA
ccggccaacatggtgacaccccgcc

SEQ ID NO: 35348 - DNA, 25 bp, synthetic construct
  misc_feature 1..25: note = Oligonucleotide
  source 1..25: mol_type = other DNA
agcccggccaacatggtgacacccc

SEQ ID NO: 35349 - DNA, 25 bp, synthetic construct
  misc_feature 1..25: note = Oligonucleotide
  source 1..25: mol_type = other DNA
accagcccggccaacatggtgacac

SEQ ID NO: 35350 - DNA, 25 bp, synthetic construct
  misc_feature 1..25: note = Oligonucleotide
  source 1..25: mol_type = other DNA
gagaccagcccggccaacatggtga

SEQ ID NO: 35351 - DNA, 25 bp, synthetic construct
  misc_feature 1..25: note = Oligonucleotide
  source 1..25: mol_type = other DNA
ttcgagaccagcccggccaacatgg

SEQ ID NO: 35352 - DNA, 25 bp, synthetic construct
  misc_feature 1..25: note = Oligonucleotide
  source 1..25: mol_type = other DNA
gagttcgagaccagcccggccaaca

SEQ ID NO: 35353 - DNA, 25 bp, synthetic construct
  misc_feature 1..25: note = Oligonucleotide
  source 1..25: mol_type = other DNA
caggagttcgagaccagcccggcca

SEQ ID NO: 35354 - DNA, 25 bp, synthetic construct
  misc_feature 1..25: note = Oligonucleotide
  source 1..25: mol_type = other DNA
ggtcaggagttcgagaccagcccgg

SEQ ID NO: 35355 - DNA, 25 bp, synthetic construct
  misc_feature 1..25: note = Oligonucleotide
  source 1..25: mol_type = other DNA
tgaggtcaggagttcgagaccagcc

SEQ ID NO: 35356 - DNA, 25 bp, synthetic construct
  misc_feature 1..25: note = Oligonucleotide
  source 1..25: mol_type = other DNA
acctgaggtcaggagttcgagacca

SEQ ID NO: 35357 - DNA, 25 bp, synthetic construct
  misc_feature 1..25: note = Oligonucleotide
  source 1..25: mol_type = other DNA
attacctgaggtcaggagttcgaga

SEQ ID NO: 35358 - DNA, 25 bp, synthetic construct
  misc_feature 1..25: note = Oligonucleotide
  source 1..25: mol_type = other DNA
cagattacctgaggtcaggagttcg

SEQ ID NO: 35359 - DNA, 25 bp, synthetic construct
  misc_feature 1..25: note = Oligonucleotide
  source 1..25: mol_type = other DNA
aggcagattacctgaggtcaggagt

SEQ ID NO: 35360 - DNA, 25 bp, synthetic construct
  misc_feature 1..25: note = Oligonucleotide
  source 1..25: mol_type = other DNA
ggcaggcagattacctgaggtcagg

SEQ ID NO: 35361 - DNA, 25 bp, synthetic construct
  misc_feature 1..25: note = Oligonucleotide
  source 1..25: mol_type = other DNA
cgaggcaggcagattacctgaggtc

SEQ ID NO: 35362 - DNA, 25 bp, synthetic construct
  misc_feature 1..25: note = Oligonucleotide
  source 1..25: mol_type = other DNA
ggccgaggcaggcagattacctgag

SEQ ID NO: 35363 - DNA, 25 bp, synthetic construct
  misc_feature 1..25: note = Oligonucleotide
  source 1..25: mol_type = other DNA
ggaggccgaggcaggcagattacct

SEQ ID NO: 35364 - DNA, 25 bp, synthetic construct
  misc_feature 1..25: note = Oligonucleotide
  source 1..25: mol_type = other DNA
ttgggaggccgaggcaggcagatta

SEQ ID NO: 35365 - DNA, 25 bp, synthetic construct
  misc_feature 1..25: note = Oligonucleotide
  source 1..25: mol_type = other DNA
actttgggaggccgaggcaggcaga

SEQ ID NO: 35366 - DNA, 25 bp, synthetic construct
  misc_feature 1..25: note = Oligonucleotide
  source 1..25: mol_type = other DNA
agcactttgggaggccgaggcaggc

SEQ ID NO: 35367 - DNA, 25 bp, synthetic construct
  misc_feature 1..25: note = Oligonucleotide
  source 1..25: mol_type = other DNA
cccagcactttgggaggccgaggca

SEQ ID NO: 35368 - DNA, 25 bp, synthetic construct
  misc_feature 1..25: note = Oligonucleotide
  source 1..25: mol_type = other DNA
aatcccagcactttgggaggccgag

SEQ ID NO: 35369 - DNA, 25 bp, synthetic construct
  misc_feature 1..25: note = Oligonucleotide
  source 1..25: mol_type = other DNA
tgtaatcccagcactttgggaggcc

SEQ ID NO: 35370 - DNA, 25 bp, synthetic construct
  misc_feature 1..25: note = Oligonucleotide
  source 1..25: mol_type = other DNA
gcctgtaatcccagcactttgggag

SEQ ID NO: 35371 - DNA, 25 bp, synthetic construct
  misc_feature 1..25: note = Oligonucleotide
  source 1..25: mol_type = other DNA
cacgcctgtaatcccagcactttgg

SEQ ID NO: 35372 - DNA, 25 bp, synthetic construct
  misc_feature 1..25: note = Oligonucleotide
  source 1..25: mol_type = other DNA
cctcacgcctgtaatcccagcactt

SEQ ID NO: 35373 - DNA, 25 bp, synthetic construct
  misc_feature 1..25: note = Oligonucleotide
  source 1..25: mol_type = other DNA
gagcctcacgcctgtaatcccagca

SEQ ID NO: 35374 - DNA, 25 bp, synthetic construct
  misc_feature 1..25: note = Oligonucleotide
  source 1..25: mol_type = other DNA
aaagagcctcacgcctgtaatccca

SEQ ID NO: 35375 - DNA, 25 bp, synthetic construct
  misc_feature 1..25: note = Oligonucleotide
  source 1..25: mol_type = other DNA
aagaaagagcctcacgcctgtaatc

SEQ ID NO: 35376 - DNA, 25 bp, synthetic construct
  misc_feature 1..25: note = Oligonucleotide
  source 1..25: mol_type = other DNA
agaaagaaagagcctcacgcctgta

SEQ ID NO: 35377 - DNA, 25 bp, synthetic construct
  misc_feature 1..25: note = Oligonucleotide
  source 1..25: mol_type = other DNA
cacagaaagaaagagcctcacgcct

SEQ ID NO: 35378 - DNA, 25 bp, synthetic construct
  misc_feature 1..25: note = Oligonucleotide
  source 1..25: mol_type = other DNA
gatcacagaaagaaagagcctcacg

SEQ ID NO: 35379 - DNA, 25 bp, synthetic construct
  misc_feature 1..25: note = Oligonucleotide
  source 1..25: mol_type = other DNA
tcagatcacagaaagaaagagcctc

SEQ ID NO: 35380 - DNA, 25 bp, synthetic construct
  misc_feature 1..25: note = Oligonucleotide
  source 1..25: mol_type = other DNA
ggctcagatcacagaaagaaagagc

SEQ ID NO: 35381 - DNA, 25 bp, synthetic construct
  misc_feature 1..25: note = Oligonucleotide
  source 1..25: mol_type = other DNA
ctgggctcagatcacagaaagaaag

SEQ ID NO: 35382 - DNA, 25 bp, synthetic construct
  misc_feature 1..25: note = Oligonucleotide
  source 1..25: mol_type = other DNA
gaactgggctcagatcacagaaaga

SEQ ID NO: 35383 - DNA, 25 bp, synthetic construct
  misc_feature 1..25: note = Oligonucleotide
  source 1..25: mol_type = other DNA
acagaactgggctcagatcacagaa

SEQ ID NO: 35384 - DNA, 25 bp, synthetic construct
  misc_feature 1..25: note = Oligonucleotide
  source 1..25: mol_type = other DNA
ggaacagaactgggctcagatcaca

SEQ ID NO: 35385 - DNA, 25 bp, synthetic construct
  misc_feature 1..25: note = Oligonucleotide
  source 1..25: mol_type = other DNA
ctgggaacagaactgggctcagatc

SEQ ID NO: 35386 - DNA, 25 bp, synthetic construct
  misc_feature 1..25: note = Oligonucleotide
  source 1..25: mol_type = other DNA
agtctgggaacagaactgggctcag

SEQ ID NO: 35387 - DNA, 25 bp, synthetic construct
  misc_feature 1..25: note = Oligonucleotide
  source 1..25: mol_type = other DNA
ttaagtctgggaacagaactgggct

SEQ ID NO: 35388 - DNA, 25 bp, synthetic construct
  misc_feature 1..25: note = Oligonucleotide
  source 1..25: mol_type = other DNA
gagttaagtctgggaacagaactgg

SEQ ID NO: 35389 - DNA, 25 bp, synthetic construct
  misc_feature 1..25: note = Oligonucleotide
  source 1..25: mol_type = other DNA
gcagagttaagtctgggaacagaac

SEQ ID NO: 35390 - DNA, 25 bp, synthetic construct
  misc_feature 1..25: note = Oligonucleotide
  source 1..25: mol_type = other DNA
gaggcagagttaagtctgggaacag

SEQ ID NO: 35391 - DNA, 25 bp, synthetic construct
  misc_feature 1..25: note = Oligonucleotide
  source 1..25: mol_type = other DNA
ccagaggcagagttaagtctgggaa

SEQ ID NO: 35392 - DNA, 25 bp, synthetic construct
  misc_feature 1..25: note = Oligonucleotide
  source 1..25: mol_type = other DNA
tgaccagaggcagagttaagtctgg

SEQ ID NO: 35393 - DNA, 25 bp, synthetic construct
  misc_feature 1..25: note = Oligonucleotide
  source 1..25: mol_type = other DNA
ctatgaccagaggcagagttaagtc

SEQ ID NO: 35394 - DNA, 25 bp, synthetic construct
  misc_feature 1..25: note = Oligonucleotide
  source 1..25: mol_type = other DNA
cttctatgaccagaggcagagttaa

SEQ ID NO: 35395 - DNA, 25 bp, synthetic construct
  misc_feature 1..25: note = Oligonucleotide
  source 1..25: mol_type = other DNA
ttccttctatgaccagaggcagagt

SEQ ID NO: 35396 - DNA, 25 bp, synthetic construct
  misc_feature 1..25: note = Oligonucleotide
  source 1..25: mol_type = other DNA
gggttccttctatgaccagaggcag

SEQ ID NO: 35397 - DNA, 25 bp, synthetic construct
  misc_feature 1..25: note = Oligonucleotide
  source 1..25: mol_type = other DNA
ttggggttccttctatgaccagagg

SEQ ID NO: 35398 - DNA, 25 bp, synthetic construct
  misc_feature 1..25: note = Oligonucleotide
  source 1..25: mol_type = other DNA
aagttggggttccttctatgaccag

SEQ ID NO: 35399 - DNA, 25 bp, synthetic construct
  misc_feature 1..25: note = Oligonucleotide
  source 1..25: mol_type = other DNA
ccaaagttggggttccttctatgac

SEQ ID NO: 35400 - DNA, 25 bp, synthetic construct
  misc_feature 1..25: note = Oligonucleotide
  source 1..25: mol_type = other DNA
ggaccaaagttggggttccttctat

SEQ ID NO: 35401 - DNA, 25 bp, synthetic construct
  misc_feature 1..25: note = Oligonucleotide
  source 1..25: mol_type = other DNA
ttaggaccaaagttggggttccttc

SEQ ID NO: 35402 - DNA, 25 bp, synthetic construct
  misc_feature 1..25: note = Oligonucleotide
  source 1..25: mol_type = other DNA
agtttaggaccaaagttggggttcc

SEQ ID NO: 35403 - DNA, 25 bp, synthetic construct
  misc_feature 1..25: note = Oligonucleotide
  source 1..25: mol_type = other DNA
ttcagtttaggaccaaagttggggt

SEQ ID NO: 35404 - DNA, 25 bp, synthetic construct
  misc_feature 1..25: note = Oligonucleotide
  source 1..25: mol_type = other DNA
gggttcagtttaggaccaaagttgg

SEQ ID NO: 35405 - DNA, 25 bp, synthetic construct
  misc_feature 1..25: note = Oligonucleotide
  source 1..25: mol_type = other DNA
tcagggttcagtttaggaccaaagt

SEQ ID NO: 35406 - DNA, 25 bp, synthetic construct
  misc_feature 1..25: note = Oligonucleotide
  source 1..25: mol_type = other DNA
acttcagggttcagtttaggaccaa

SEQ ID NO: 35407 - DNA, 25 bp, synthetic construct
  misc_feature 1..25: note = Oligonucleotide
  source 1..25: mol_type = other DNA
aggacttcagggttcagtttaggac

SEQ ID NO: 35408 - DNA, 25 bp, synthetic construct
  misc_feature 1..25: note = Oligonucleotide
  source 1..25: mol_type = other DNA
gccaggacttcagggttcagtttag

SEQ ID NO: 35409 - DNA, 25 bp, synthetic construct
  misc_feature 1..25: note = Oligonucleotide
  source 1..25: mol_type = other DNA
gtggccaggacttcagggttcagtt

SEQ ID NO: 35410 - DNA, 25 bp, synthetic construct
  misc_feature 1..25: note = Oligonucleotide
  source 1..25: mol_type = other DNA
cctgtggccaggacttcagggttca

SEQ ID NO: 35411 - DNA, 25 bp, synthetic construct
  misc_feature 1..25: note = Oligonucleotide
  source 1..25: mol_type = other DNA
cttcctgtggccaggacttcagggt

SEQ ID NO: 35412 - DNA, 25 bp, synthetic construct
  misc_feature 1..25: note = Oligonucleotide
  source 1..25: mol_type = other DNA
tcccttcctgtggccaggacttcag

SEQ ID NO: 35413 - DNA, 25 bp, synthetic construct
  misc_feature 1..25: note = Oligonucleotide
  source 1..25: mol_type = other DNA
gggtcccttcctgtggccaggactt

SEQ ID NO: 35414 - DNA, 25 bp, synthetic construct
  misc_feature 1..25: note = Oligonucleotide
  source 1..25: mol_type = other DNA
atggggtcccttcctgtggccagga

SEQ ID NO: 35415 - DNA, 25 bp, synthetic construct
  misc_feature 1..25: note = Oligonucleotide
  source 1..25: mol_type = other DNA
agaatggggtcccttcctgtggcca

SEQ ID NO: 35416 - DNA, 25 bp, synthetic construct
  misc_feature 1..25: note = Oligonucleotide
  source 1..25: mol_type = other DNA
accagaatggggtcccttcctgtgg

SEQ ID NO: 35417 - DNA, 25 bp, synthetic construct
  misc_feature 1..25: note = Oligonucleotide
  source 1..25: mol_type = other DNA
agaaccagaatggggtcccttcctg

SEQ ID NO: 35418 - DNA, 25 bp, synthetic construct
  misc_feature 1..25: note = Oligonucleotide
  source 1..25: mol_type = other DNA
cctagaaccagaatggggtcccttc

SEQ ID NO: 35419 - DNA, 25 bp, synthetic construct
  misc_feature 1..25: note = Oligonucleotide
  source 1..25: mol_type = other DNA
cagcctagaaccagaatggggtccc

SEQ ID NO: 35420 - DNA, 25 bp, synthetic construct
  misc_feature 1..25: note = Oligonucleotide
  source 1..25: mol_type = other DNA
gctcagcctagaaccagaatggggt

SEQ ID NO: 35421 - DNA, 25 bp, synthetic construct
  misc_feature 1..25: note = Oligonucleotide
  source 1..25: mol_type = other DNA
agggctcagcctagaaccagaatgg

SEQ ID NO: 35422 - DNA, 25 bp, synthetic construct
  misc_feature 1..25: note = Oligonucleotide
  source 1..25: mol_type = other DNA
gatagggctcagcctagaaccagaa

SEQ ID NO: 35423 - DNA, 25 bp, synthetic construct
  misc_feature 1..25: note = Oligonucleotide
  source 1..25: mol_type = other DNA
agggatagggctcagcctagaacca

SEQ ID NO: 35424 - DNA, 25 bp, synthetic construct
  misc_feature 1..25: note = Oligonucleotide
  source 1..25: mol_type = other DNA
gccagggatagggctcagcctagaa

SEQ ID NO: 35425 - DNA, 25 bp, synthetic construct
  misc_feature 1..25: note = Oligonucleotide
  source 1..25: mol_type = other DNA
gaagccagggatagggctcagccta

SEQ ID NO: 35426 - DNA, 25 bp, synthetic construct
  misc_feature 1..25: note = Oligonucleotide
  source 1..25: mol_type = other DNA
actgaagccagggatagggctcagc

SEQ ID NO: 35427 - DNA, 25 bp, synthetic construct
  misc_feature 1..25: note = Oligonucleotide
  source 1..25: mol_type = other DNA
aagactgaagccagggatagggctc

SEQ ID NO: 35428 - DNA, 25 bp, synthetic construct
  misc_feature 1..25: note = Oligonucleotide
  source 1..25: mol_type = other DNA
accaagactgaagccagggataggg

SEQ ID NO: 35429 - DNA, 25 bp, synthetic construct
  misc_feature 1..25: note = Oligonucleotide
  source 1..25: mol_type = other DNA
agaaccaagactgaagccagggata

SEQ ID NO: 35430 - DNA, 25 bp, synthetic construct
  misc_feature 1..25: note = Oligonucleotide
  source 1..25: mol_type = other DNA
ggtagaaccaagactgaagccaggg

SEQ ID NO: 35431 - DNA, 25 bp, synthetic construct
  misc_feature 1..25: note = Oligonucleotide
  source 1..25: mol_type = other DNA
tggggtagaaccaagactgaagcca

SEQ ID NO: 35432 - DNA, 25 bp, synthetic construct
  misc_feature 1..25: note = Oligonucleotide
  source 1..25: mol_type = other DNA
ggctggggtagaaccaagactgaag

SEQ ID NO: 35433 - DNA, 25 bp, synthetic construct
  misc_feature 1..25: note = Oligonucleotide
  source 1..25: mol_type = other DNA
tatggctggggtagaaccaagactg

SEQ ID NO: 35434 - DNA, 25 bp, synthetic construct
  misc_feature 1..25: note = Oligonucleotide
  source 1..25: mol_type = other DNA
ttctatggctggggtagaaccaaga

SEQ ID NO: 35435 - DNA, 25 bp, synthetic construct
  misc_feature 1..25: note = Oligonucleotide
  source 1..25: mol_type = other DNA
tccttctatggctggggtagaacca

SEQ ID NO: 35436 - DNA, 25 bp, synthetic construct
  misc_feature 1..25: note = Oligonucleotide
  source 1..25: mol_type = other DNA
ggttccttctatggctggggtagaa

SEQ ID NO: 35437 - DNA, 25 bp, synthetic construct
  misc_feature 1..25: note = Oligonucleotide
  source 1..25: mol_type = other DNA
aagggttccttctatggctggggta

SEQ ID NO: 35438 - DNA, 25 bp, synthetic construct
  misc_feature 1..25: note = Oligonucleotide
  source 1..25: mol_type = other DNA
gaaaagggttccttctatggctggg

SEQ ID NO: 35439 - DNA, 25 bp, synthetic construct
  misc_feature 1..25: note = Oligonucleotide
  source 1..25: mol_type = other DNA
caggaaaagggttccttctatggct

SEQ ID NO: 35440 - DNA, 25 bp, synthetic construct
  misc_feature 1..25: note = Oligonucleotide
  source 1..25: mol_type = other DNA
gaccaggaaaagggttccttctatg

SEQ ID NO: 35441 - DNA, 25 bp, synthetic construct
  misc_feature 1..25: note = Oligonucleotide
  source 1..25: mol_type = other DNA
ggggaccaggaaaagggttccttct

SEQ ID NO: 35442 - DNA, 25 bp, synthetic construct
  misc_feature 1..25: note = Oligonucleotide
  source 1..25: mol_type = other DNA
tctggggaccaggaaaagggttcct

SEQ ID NO: 35443 - DNA, 25 bp, synthetic construct
  misc_feature 1..25: note = Oligonucleotide
  source 1..25: mol_type = other DNA
aattctggggaccaggaaaagggtt

SEQ ID NO: 35444 - DNA, 25 bp, synthetic construct
  misc_feature 1..25: note = Oligonucleotide
  source 1..25: mol_type = other DNA
gataattctggggaccaggaaaagg

SEQ ID NO: 35445 - DNA, 25 bp, synthetic construct
  misc_feature 1..25: note = Oligonucleotide
  source 1..25: mol_type = other DNA
agggataattctggggaccaggaaa

SEQ ID NO: 35446 - DNA, 25 bp, synthetic construct
  misc_feature 1..25: note = Oligonucleotide
  source 1..25: mol_type = other DNA
gtcagggataattctggggaccagg

SEQ ID NO: 35447 - DNA, 25 bp, synthetic construct
  misc_feature 1..25: note = Oligonucleotide
  source 1..25: mol_type = other DNA
gaggtcagggataattctggggacc

SEQ ID NO: 35448 - DNA, 25 bp, synthetic construct
  misc_feature 1..25: note = Oligonucleotide
  source 1..25: mol_type = other DNA
agtgaggtcagggataattctgggg

SEQ ID NO: 35449 - DNA, 25 bp, synthetic construct
  misc_feature 1..25: note = Oligonucleotide
  source 1..25: mol_type = other DNA
atgagtgaggtcagggataattctg

SEQ ID NO: 35450 - DNA, 25 bp, synthetic construct
  misc_feature 1..25: note = Oligonucleotide
  source 1..25: mol_type = other DNA
ttcatgagtgaggtcagggataatt

SEQ ID NO: 35451 - DNA, 25 bp, synthetic construct
  misc_feature 1..25: note = Oligonucleotide
  source 1..25: mol_type = other DNA
tggttcatgagtgaggtcagggata

SEQ ID NO: 35452 - DNA, 25 bp, synthetic construct
  misc_feature 1..25: note = Oligonucleotide
  source 1..25: mol_type = other DNA
gcttggttcatgagtgaggtcaggg

SEQ ID NO: 35453 - DNA, 25 bp, synthetic construct
  misc_feature 1..25: note = Oligonucleotide
  source 1..25: mol_type = other DNA
agggcttggttcatgagtgaggtca

SEQ ID NO: 35454 - DNA, 25 bp, synthetic construct
  misc_feature 1..25: note = Oligonucleotide
  source 1..25: mol_type = other DNA
gtcagggcttggttcatgagtgagg

SEQ ID NO: 35455 - DNA, 25 bp, synthetic construct
  misc_feature 1..25: note = Oligonucleotide
  source 1..25: mol_type = other DNA
agggtcagggcttggttcatgagtg

SEQ ID NO: 35456 - DNA, 25 bp, synthetic construct
  misc_feature 1..25: note = Oligonucleotide
  source 1..25: mol_type = other DNA
gacagggtcagggcttggttcatga

SEQ ID NO: 35457 - DNA, 25 bp, synthetic construct
  misc_feature 1..25: note = Oligonucleotide
  source 1..25: mol_type = other DNA
aaggacagggtcagggcttggttca

SEQ ID NO: 35458 - DNA, 25 bp, synthetic construct
  misc_feature 1..25: note = Oligonucleotide
  source 1..25: mol_type = other DNA
ggcaaggacagggtcagggcttggt

SEQ ID NO: 35459 - DNA, 25 bp, synthetic construct
  misc_feature 1..25: note = Oligonucleotide
  source 1..25: mol_type = other DNA
tgtggcaaggacagggtcagggctt

SEQ ID NO: 35460 - DNA, 25 bp, synthetic construct
  misc_feature 1..25: note = Oligonucleotide
  source 1..25: mol_type = other DNA
gcctgtggcaaggacagggtcaggg

SEQ ID NO: 35461 - DNA, 25 bp, synthetic construct
  misc_feature 1..25: note = Oligonucleotide
  source 1..25: mol_type = other DNA
tcagcctgtggcaaggacagggtca

SEQ ID NO: 35462 - DNA, 25 bp, synthetic construct
  misc_feature 1..25: note = Oligonucleotide
  source 1..25: mol_type = other DNA
agctcagcctgtggcaaggacaggg

SEQ ID NO: 35463 - DNA, 25 bp, synthetic construct
  misc_feature 1..25: note = Oligonucleotide
  source 1..25: mol_type = other DNA
ggcagctcagcctgtggcaaggaca

SEQ ID NO: 35464 - DNA, 25 bp, synthetic construct
  misc_feature 1..25: note = Oligonucleotide
  source 1..25: mol_type = other DNA
tggggcagctcagcctgtggcaagg

SEQ ID NO: 35465 - DNA, 25 bp, synthetic construct
  misc_feature 1..25: note = Oligonucleotide
  source 1..25: mol_type = other DNA
gcatggggcagctcagcctgtggca

SEQ ID NO: 35466 - DNA, 25 bp, synthetic construct
  misc_feature 1..25: note = Oligonucleotide
  source 1..25: mol_type = other DNA
ttggcatggggcagctcagcctgtg

SEQ ID NO: 35467 - DNA, 25 bp, synthetic construct
  misc_feature 1..25: note = Oligonucleotide
  source 1..25: mol_type = other DNA
tgcttggcatggggcagctcagcct

SEQ ID NO: 35468 - DNA, 25 bp, synthetic construct
  misc_feature 1..25: note = Oligonucleotide
  source 1..25: mol_type = other DNA
acctgcttggcatggggcagctcag

SEQ ID NO: 35469 - DNA, 25 bp, synthetic construct
  misc_feature 1..25: note = Oligonucleotide
  source 1..25: mol_type = other DNA
accacctgcttggcatggggcagct

SEQ ID NO: 35470 - DNA, 25 bp, synthetic construct
  misc_feature 1..25: note = Oligonucleotide
  source 1..25: mol_type = other DNA
aagaccacctgcttggcatggggca

SEQ ID NO: 35471 - DNA, 25 bp, synthetic construct
  misc_feature 1..25: note = Oligonucleotide
  source 1..25: mol_type = other DNA
gttaagaccacctgcttggcatggg

SEQ ID NO: 35472 - DNA, 25 bp, synthetic construct
  misc_feature 1..25: note = Oligonucleotide
  source 1..25: mol_type = other DNA
gcagttaagaccacctgcttggcat

SEQ ID NO: 35473 - DNA, 25 bp, synthetic construct
  misc_feature 1..25: note = Oligonucleotide
  source 1..25: mol_type = other DNA
actgcagttaagaccacctgcttgg

SEQ ID NO: 35474 - DNA, 25 bp, synthetic construct
  misc_feature 1..25: note = Oligonucleotide
  source 1..25: mol_type = other DNA
taaactgcagttaagaccacctgct

SEQ ID NO: 35475 - DNA, 25 bp, synthetic construct
  misc_feature 1..25: note = Oligonucleotide
  source 1..25: mol_type = other DNA
aactaaactgcagttaagaccacct

SEQ ID NO: 35476 - DNA, 25 bp, synthetic construct
  misc_feature 1..25: note = Oligonucleotide
  source 1..25: mol_type = other DNA
ctgaactaaactgcagttaagacca

SEQ ID NO: 35477 - DNA, 25 bp, synthetic construct
  misc_feature 1..25: note = Oligonucleotide
  source 1..25: mol_type = other DNA
accctgaactaaactgcagttaaga

SEQ ID NO: 35478 - DNA, 25 bp, synthetic construct
  misc_feature 1..25: note = Oligonucleotide
  source 1..25: mol_type = other DNA
tccaccctgaactaaactgcagtta

SEQ ID NO: 35479 - DNA, 25 bp, synthetic construct
  misc_feature 1..25: note = Oligonucleotide
  source 1..25: mol_type = other DNA
ttctccaccctgaactaaactgcag

SEQ ID NO: 35480 - DNA, 25 bp, synthetic construct
  misc_feature 1..25: note = Oligonucleotide
  source 1..25: mol_type = other DNA
ctgttctccaccctgaactaaactg

SEQ ID NO: 35481 - DNA, 25 bp, synthetic construct
  misc_feature 1..25: note = Oligonucleotide
  source 1..25: mol_type = other DNA
tagctgttctccaccctgaactaaa

SEQ ID NO: 35482 - DNA, 25 bp, synthetic construct
  misc_feature 1..25: note = Oligonucleotide
  source 1..25: mol_type = other DNA
tggtagctgttctccaccctgaact

SEQ ID NO: 35483 - DNA, 25 bp, synthetic construct
  misc_feature 1..25: note = Oligonucleotide
  source 1..25: mol_type = other DNA
cgttggtagctgttctccaccctga

SEQ ID NO: 35484 - DNA, 25 bp, synthetic construct
  misc_feature 1..25: note = Oligonucleotide
  source 1..25: mol_type = other DNA
ggacgttggtagctgttctccaccc

SEQ ID NO: 35485 - DNA, 25 bp, synthetic construct
  misc_feature 1..25: note = Oligonucleotide
  source 1..25: mol_type = other DNA
aatggacgttggtagctgttctcca

SEQ ID NO: 35486 - DNA, 25 bp, synthetic construct
  misc_feature 1..25: note = Oligonucleotide
  source 1..25: mol_type = other DNA
cccaatggacgttggtagctgttct

SEQ ID NO: 35487 - DNA, 25 bp, synthetic construct
  misc_feature 1..25: note = Oligonucleotide
  source 1..25: mol_type = other DNA
cagcccaatggacgttggtagctgt

SEQ ID NO: 35488 - DNA, 25 bp, synthetic construct
  misc_feature 1..25: note = Oligonucleotide
  source 1..25: mol_type = other DNA
cgtcagcccaatggacgttggtagc

SEQ ID NO: 35489 - DNA, 25 bp, synthetic construct
  misc_feature 1..25: note = Oligonucleotide
  source 1..25: mol_type = other DNA
ccacgtcagcccaatggacgttggt

SEQ ID NO: 35490 - DNA, 25 bp, synthetic construct
  misc_feature 1..25: note = Oligonucleotide
  source 1..25: mol_type = other DNA
tgaccacgtcagcccaatggacgtt

SEQ ID NO: 35491 - DNA, 25 bp, synthetic construct
  misc_feature 1..25: note = Oligonucleotide
  source 1..25: mol_type = other DNA
ttctgaccacgtcagcccaatggac

SEQ ID NO: 35492 - DNA, 25 bp, synthetic construct
  misc_feature 1..25: note = Oligonucleotide
  source 1..25: mol_type = other DNA
aaattctgaccacgtcagcccaatg

SEQ ID NO: 35493 - DNA, 25 bp, synthetic construct
  misc_feature 1..25: note = Oligonucleotide
  source 1..25: mol_type = other DNA
tgaaaattctgaccacgtcagccca

SEQ ID NO: 35494 - DNA, 25 bp, synthetic construct
  misc_feature 1..25: note = Oligonucleotide
  source 1..25: mol_type = other DNA
tggtgaaaattctgaccacgtcagc

SEQ ID NO: 35495 - DNA, 25 bp, synthetic construct
  misc_feature 1..25: note = Oligonucleotide
  source 1..25: mol_type = other DNA
ctatggtgaaaattctgaccacgtc

SEQ ID NO: 35496 - DNA, 25 bp, synthetic construct
  misc_feature 1..25: note = Oligonucleotide
  source 1..25: mol_type = other DNA
tagctatggtgaaaattctgaccac

SEQ ID NO: 35497 - DNA, 25 bp, synthetic construct
  misc_feature 1..25: note = Oligonucleotide
  source 1..25: mol_type = other DNA
gaatagctatggtgaaaattctgac

SEQ ID NO: 35498 - DNA, 25 bp, synthetic construct
  misc_feature 1..25: note = Oligonucleotide
  source 1..25: mol_type = other DNA
ttggaatagctatggtgaaaattct

SEQ ID NO: 35499 - DNA, 25 bp, synthetic construct
  misc_feature 1..25: note = Oligonucleotide
  source 1..25: mol_type = other DNA
tatttggaatagctatggtgaaaat

SEQ ID NO: 35500 - DNA, 25 bp, synthetic construct
  misc_feature 1..25: note = Oligonucleotide
  source 1..25: mol_type = other DNA
ttttatttggaatagctatggtgaa

SEQ ID NO: 35501 - DNA, 25 bp, synthetic construct
  misc_feature 1..25: note = Oligonucleotide
  source 1..25: mol_type = other DNA
ttattttatttggaatagctatggt

SEQ ID NO: 35502 - DNA, 25 bp, synthetic construct
  misc_feature 1..25: note = Oligonucleotide
  source 1..25: mol_type = other DNA
gttttattttatttggaatagctat

SEQ ID NO: 35503 - DNA, 25 bp, synthetic construct
  misc_feature 1..25: note = Oligonucleotide
  source 1..25: mol_type = other DNA
tgggttttattttatttggaatagc

SEQ ID NO: 35504 - DNA, 25 bp, synthetic construct
  misc_feature 1..25: note = Oligonucleotide
  source 1..25: mol_type = other DNA
ctttgggttttattttatttggaat

SEQ ID NO: 35505 - DNA, 25 bp, synthetic construct
  misc_feature 1..25: note = Oligonucleotide
  source 1..25: mol_type = other DNA
tttctttgggttttattttatttgg

SEQ ID NO: 35506 - DNA, 25 bp, synthetic construct
  misc_feature 1..25: note = Oligonucleotide
  source 1..25: mol_type = other DNA
ttttttctttgggttttattttatt

SEQ ID NO: 35507 - DNA, 25 bp, synthetic construct
  misc_feature 1..25: note = Oligonucleotide
  source 1..25: mol_type = other DNA
tgtttttttctttgggttttatttt

SEQ ID NO: 35508 - DNA, 25 bp, synthetic construct
  misc_feature 1..25: note = Oligonucleotide
  source 1..25: mol_type = other DNA
ttttgtttttttctttgggttttat

SEQ ID NO: 35509 - DNA, 25 bp, synthetic construct
  misc_feature 1..25: note = Oligonucleotide
  source 1..25: mol_type = other DNA
gttttttgtttttttctttgggttt

SEQ ID NO: 35510 - DNA, 25 bp, synthetic construct
  misc_feature 1..25: note = Oligonucleotide
  source 1..25: mol_type = other DNA
ggggttttttgtttttttctttggg

SEQ ID NO: 35511 - DNA, 25 bp, synthetic construct
  misc_feature 1..25: note = Oligonucleotide
  source 1..25: mol_type = other DNA
catggggttttttgtttttttcttt

SEQ ID NO: 35512 - DNA, 25 bp, synthetic construct
  misc_feature 1..25: note = Oligonucleotide
  source 1..25: mol_type = other DNA
ctacatggggttttttgtttttttc

SEQ ID NO: 35513 - DNA, 25 bp, synthetic construct
  misc_feature 1..25: note = Oligonucleotide
  source 1..25: mol_type = other DNA
tatctacatggggttttttgttttt

SEQ ID NO: 35514 - DNA, 25 bp, synthetic construct
  misc_feature 1..25: note = Oligonucleotide
  source 1..25: mol_type = other DNA
aattatctacatggggttttttgtt

SEQ ID NO: 35515 - DNA, 25 bp, synthetic construct
  misc_feature 1..25: note = Oligonucleotide
  source 1..25: mol_type = other DNA
ctgaattatctacatggggtttttt

SEQ ID NO: 35516 - DNA, 25 bp, synthetic construct
  misc_feature 1..25: note = Oligonucleotide
  source 1..25: mol_type = other DNA
attctgaattatctacatggggttt

SEQ ID NO: 35517 - DNA, 25 bp, synthetic construct
  misc_feature 1..25: note = Oligonucleotide
  source 1..25: mol_type = other DNA
ttcattctgaattatctacatgggg

SEQ ID NO: 35518 - DNA, 25 bp, synthetic construct
  misc_feature 1..25: note = Oligonucleotide
  source 1..25: mol_type = other DNA
cttttcattctgaattatctacatg

SEQ ID NO: 35519 - DNA, 25 bp, synthetic construct
  misc_feature 1..25: note = Oligonucleotide
  source 1..25: mol_type = other DNA
ctccttttcattctgaattatctac

SEQ ID NO: 35520 - DNA, 25 bp, synthetic construct
  misc_feature 1..25: note = Oligonucleotide
  source 1..25: mol_type = other DNA
tctctccttttcattctgaattatc

SEQ ID NO: 35521 - DNA, 25 bp, synthetic construct
  misc_feature 1..25: note = Oligonucleotide
  source 1..25: mol_type = other DNA
gtttctctccttttcattctgaatt

SEQ ID NO: 35522 - DNA, 25 bp, synthetic construct
  misc_feature 1..25: note = Oligonucleotide
  source 1..25: mol_type = other DNA
ttggtttctctccttttcattctga

SEQ ID NO: 35523 - DNA, 25 bp, synthetic construct
  misc_feature 1..25: note = Oligonucleotide
  source 1..25: mol_type = other DNA
gctttggtttctctccttttcattc

SEQ ID NO: 35524 - DNA, 25 bp, synthetic construct
  misc_feature 1..25: note = Oligonucleotide
  source 1..25: mol_type = other DNA
ctggctttggtttctctccttttca

SEQ ID NO: 35525 - DNA, 25 bp, synthetic construct
  misc_feature 1..25: note = Oligonucleotide
  source 1..25: mol_type = other DNA
cctctggctttggtttctctccttt

SEQ ID NO: 35526 - DNA, 25 bp, synthetic construct
  misc_feature 1..25: note = Oligonucleotide
  source 1..25: mol_type = other DNA
aagcctctggctttggtttctctcc

SEQ ID NO: 35527 - DNA, 25 bp, synthetic construct
  misc_feature 1..25: note = Oligonucleotide
  source 1..25: mol_type = other DNA
tggaagcctctggctttggtttctc

SEQ ID NO: 35528 - DNA, 25 bp, synthetic construct
  misc_feature 1..25: note = Oligonucleotide
  source 1..25: mol_type = other DNA
ctatggaagcctctggctttggttt

SEQ ID NO: 35529 - DNA, 25 bp, synthetic construct
  misc_feature 1..25: note = Oligonucleotide
  source 1..25: mol_type = other DNA
gagctatggaagcctctggctttgg

SEQ ID NO: 35530 - DNA, 25 bp, synthetic construct
  misc_feature 1..25: note = Oligonucleotide
  source 1..25: mol_type = other DNA
aacgagctatggaagcctctggctt

SEQ ID NO: 35531 - DNA, 25 bp, synthetic construct
  misc_feature 1..25: note = Oligonucleotide
  source 1..25: mol_type = other DNA
gataacgagctatggaagcctctgg

SEQ ID NO: 35532 - DNA, 25 bp, synthetic construct
  misc_feature 1..25: note = Oligonucleotide
  source 1..25: mol_type = other DNA
ctagataacgagctatggaagcctc

SEQ ID NO: 35533 - DNA, 25 bp, synthetic construct
  misc_feature 1..25: note = Oligonucleotide
  source 1..25: mol_type = other DNA
gtactagataacgagctatggaagc

SEQ ID NO: 35534 - DNA, 25 bp, synthetic construct
  misc_feature 1..25: note = Oligonucleotide
  source 1..25: mol_type = other DNA
tgcgtactagataacgagctatgga

SEQ ID NO: 35535 - DNA, 25 bp, synthetic construct
  misc_feature 1..25: note = Oligonucleotide
  source 1..25: mol_type = other DNA
ccctgcgtactagataacgagctat

SEQ ID NO: 35536 - DNA, 25 bp, synthetic construct
  misc_feature 1..25: note = Oligonucleotide
  source 1..25: mol_type = other DNA
tgcccctgcgtactagataacgagc

SEQ ID NO: 35537 - DNA, 25 bp, synthetic construct
  misc_feature 1..25: note = Oligonucleotide
  source 1..25: mol_type = other DNA
ccttgcccctgcgtactagataacg

SEQ ID NO: 35538 - DNA, 25 bp, synthetic construct
  misc_feature 1..25: note = Oligonucleotide
  source 1..25: mol_type = other DNA
accccttgcccctgcgtactagata

SEQ ID NO: 35539 - DNA, 25 bp, synthetic construct
  misc_feature 1..25: note = Oligonucleotide
  source 1..25: mol_type = other DNA
ccaaccccttgcccctgcgtactag

SEQ ID NO: 35540 - DNA, 25 bp, synthetic construct
  misc_feature 1..25: note = Oligonucleotide
  source 1..25: mol_type = other DNA
accccaaccccttgcccctgcgtac

SEQ ID NO: 35541 - DNA, 25 bp, synthetic construct
  misc_feature 1..25: note = Oligonucleotide
  source 1..25: mol_type = other DNA
aggaccccaaccccttgcccctgcg

SEQ ID NO: 35542 - DNA, 25 bp, synthetic construct
  misc_feature 1..25: note = Oligonucleotide
  source 1..25: mol_type = other DNA
ctcaggaccccaaccccttgcccct

SEQ ID NO: 35543 - DNA, 25 bp, synthetic construct
  misc_feature 1..25: note = Oligonucleotide
  source 1..25: mol_type = other DNA
ggcctcaggaccccaaccccttgcc

SEQ ID NO: 35544 - DNA, 25 bp, synthetic construct
  misc_feature 1..25: note = Oligonucleotide
  source 1..25: mol_type = other DNA
gggggcctcaggaccccaacccctt

SEQ ID NO: 35545 - DNA, 25 bp, synthetic construct
  misc_feature 1..25: note = Oligonucleotide
  source 1..25: mol_type = other DNA
tgtgggggcctcaggaccccaaccc

SEQ ID NO: 35546 - DNA, 25 bp, synthetic construct
  misc_feature 1..25: note = Oligonucleotide
  source 1..25: mol_type = other DNA
ccttgtgggggcctcaggaccccaa

SEQ ID NO: 35547 - DNA, 25 bp, synthetic construct
  misc_feature 1..25: note = Oligonucleotide
  source 1..25: mol_type = other DNA
cagccttgtgggggcctcaggaccc

SEQ ID NO: 35548 - DNA, 25 bp, synthetic construct
  misc_feature 1..25: note = Oligonucleotide
  source 1..25: mol_type = other DNA
tcccagccttgtgggggcctcagga

SEQ ID NO: 35549 - DNA, 25 bp, synthetic construct
  misc_feature 1..25: note = Oligonucleotide
  source 1..25: mol_type = other DNA
gtctcccagccttgtgggggcctca

SEQ ID NO: 35550 - DNA, 25 bp, synthetic construct
  misc_feature 1..25: note = Oligonucleotide
  source 1..25: mol_type = other DNA
cacgtctcccagccttgtgggggcc

SEQ ID NO: 35551 - DNA, 25 bp, synthetic construct
  misc_feature 1..25: note = Oligonucleotide
  source 1..25: mol_type = other DNA
agccacgtctcccagccttgtgggg

SEQ ID NO: 35552 - DNA, 25 bp, synthetic construct
  misc_feature 1..25: note = Oligonucleotide
  source 1..25: mol_type = other DNA
tccagccacgtctcccagccttgtg

SEQ ID NO: 35553 - DNA, 25 bp, synthetic construct
  misc_feature 1..25: note = Oligonucleotide
  source 1..25: mol_type = other DNA
aggtccagccacgtctcccagcctt

SEQ ID NO: 35554 - DNA, 25 bp, synthetic construct
  misc_feature 1..25: note = Oligonucleotide
  source 1..25: mol_type = other DNA
cacaggtccagccacgtctcccagc

SEQ ID NO: 35555 - DNA, 25 bp, synthetic construct
  misc_feature 1..25: note = Oligonucleotide
  source 1..25: mol_type = other DNA
tctcacaggtccagccacgtctccc

SEQ ID NO: 35556 - DNA, 25 bp, synthetic construct
  misc_feature 1..25: note = Oligonucleotide
  source 1..25: mol_type = other DNA
gcttctcacaggtccagccacgtct

SEQ ID NO: 35557 - DNA, 25 bp, synthetic construct
  misc_feature 1..25: note = Oligonucleotide
  source 1..25: mol_type = other DNA
cccgcttctcacaggtccagccacg

SEQ ID NO: 35558 - DNA, 25 bp, synthetic construct
  misc_feature 1..25: note = Oligonucleotide
  source 1..25: mol_type = other DNA
cttcccgcttctcacaggtccagcc

SEQ ID NO: 35559 - DNA, 25 bp, synthetic construct
  misc_feature 1..25: note = Oligonucleotide
  source 1..25: mol_type = other DNA
aaccttcccgcttctcacaggtcca

SEQ ID NO: 35560 - DNA, 25 bp, synthetic construct
  misc_feature 1..25: note = Oligonucleotide
  source 1..25: mol_type = other DNA
tttaaccttcccgcttctcacaggt

SEQ ID NO: 35561 - DNA, 25 bp, synthetic construct
  misc_feature 1..25: note = Oligonucleotide
  source 1..25: mol_type = other DNA
gtttttaaccttcccgcttctcaca

SEQ ID NO: 35562 - DNA, 25 bp, synthetic construct
  misc_feature 1..25: note = Oligonucleotide
  source 1..25: mol_type = other DNA
ttggtttttaaccttcccgcttctc

SEQ ID NO: 35563 - DNA, 25 bp, synthetic construct
  misc_feature 1..25: note = Oligonucleotide
  source 1..25: mol_type = other DNA
ggcttggtttttaaccttcccgctt

SEQ ID NO: 35564 - DNA, 25 bp, synthetic construct
  misc_feature 1..25: note = Oligonucleotide
  source 1..25: mol_type = other DNA
ttgggcttggtttttaaccttcccg

SEQ ID NO: 35565 - DNA, 25 bp, synthetic construct
  misc_feature 1..25: note = Oligonucleotide
  source 1..25: mol_type = other DNA
tggttgggcttggtttttaaccttc

SEQ ID NO: 35566 - DNA, 25 bp, synthetic construct
  misc_feature 1..25: note = Oligonucleotide
  source 1..25: mol_type = other DNA
cagtggttgggcttggtttttaacc

SEQ ID NO: 35567 - DNA, 25 bp, synthetic construct
  misc_feature 1..25: note = Oligonucleotide
  source 1..25: mol_type = other DNA
ttccagtggttgggcttggttttta

SEQ ID NO: 35568 - DNA, 25 bp, synthetic construct
  misc_feature 1..25: note = Oligonucleotide
  source 1..25: mol_type = other DNA
taattccagtggttgggcttggttt

SEQ ID NO: 35569 - DNA, 25 bp, synthetic construct
  misc_feature 1..25: note = Oligonucleotide
  source 1..25: mol_type = other DNA
agctaattccagtggttgggcttgg

SEQ ID NO: 35570 - DNA, 25 bp, synthetic construct
  misc_feature 1..25: note = Oligonucleotide
  source 1..25: mol_type = other DNA
cgaagctaattccagtggttgggct

SEQ ID NO: 35571 - DNA, 25 bp, synthetic construct
  misc_feature 1..25: note = Oligonucleotide
  source 1..25: mol_type = other DNA
tttcgaagctaattccagtggttgg

SEQ ID NO: 35572 - DNA, 25 bp, synthetic construct
  misc_feature 1..25: note = Oligonucleotide
  source 1..25: mol_type = other DNA
ttctttcgaagctaattccagtggt

SEQ ID NO: 35573 - DNA, 25 bp, synthetic construct
  misc_feature 1..25: note = Oligonucleotide
  source 1..25: mol_type = other DNA
cagttctttcgaagctaattccagt

SEQ ID NO: 35574 - DNA, 25 bp, synthetic construct
  misc_feature 1..25: note = Oligonucleotide
  source 1..25: mol_type = other DNA
ttccagttctttcgaagctaattcc

SEQ ID NO: 35575 - DNA, 25 bp, synthetic construct
  misc_feature 1..25: note = Oligonucleotide
  source 1..25: mol_type = other DNA
gatttccagttctttcgaagctaat

SEQ ID NO: 35576 - DNA, 25 bp, synthetic construct
  misc_feature 1..25: note = Oligonucleotide
  source 1..25: mol_type = other DNA
tctgatttccagttctttcgaagct

SEQ ID NO: 35577 - DNA, 25 bp, synthetic construct
  misc_feature 1..25: note = Oligonucleotide
  source 1..25: mol_type = other DNA
ttctctgatttccagttctttcgaa

SEQ ID NO: 35578 - DNA, 25 bp, synthetic construct
  misc_feature 1..25: note = Oligonucleotide
  source 1..25: mol_type = other DNA
ttcttctctgatttccagttctttc

SEQ ID NO: 35579 - DNA, 25 bp, synthetic construct
  misc_feature 1..25: note = Oligonucleotide
  source 1..25: mol_type = other DNA
atattcttctctgatttccagttct

SEQ ID NO: 35580 - DNA, 25 bp, synthetic construct
  misc_feature 1..25: note = Oligonucleotide
  source 1..25: mol_type = other DNA
ttcatattcttctctgatttccagt

SEQ ID NO: 35581 - DNA, 25 bp, synthetic construct
  misc_feature 1..25: note = Oligonucleotide
  source 1..25: mol_type = other DNA
tttttcatattcttctctgatttcc

SEQ ID NO: 35582 - DNA, 25 bp, synthetic construct
  misc_feature 1..25: note = Oligonucleotide
  source 1..25: mol_type = other DNA
atgtttttcatattcttctctgatt

SEQ ID NO: 35583 - DNA, 25 bp, synthetic construct
  misc_feature 1..25: note = Oligonucleotide
  source 1..25: mol_type = other DNA
ttaatgtttttcatattcttctctg

SEQ ID NO: 35584 - DNA, 25 bp, synthetic construct
  misc_feature 1..25: note = Oligonucleotide
  source 1..25: mol_type = other DNA
attttaatgtttttcatattcttct

SEQ ID NO: 35585 - DNA, 25 bp, synthetic construct
  misc_feature 1..25: note = Oligonucleotide
  source 1..25: mol_type = other DNA
tttattttaatgtttttcatattct

SEQ ID NO: 35586 - DNA, 25 bp, synthetic construct
  misc_feature 1..25: note = Oligonucleotide
  source 1..25: mol_type = other DNA
tactttattttaatgtttttcatat

SEQ ID NO: 35587 - DNA, 25 bp, synthetic construct
  misc_feature 1..25: note = Oligonucleotide
  source 1..25: mol_type = other DNA
atttactttattttaatgtttttca

SEQ ID NO: 35588 - DNA, 25 bp, synthetic construct
  misc_feature 1..25: note = Oligonucleotide
  source 1..25: mol_type = other DNA
acaatttactttattttaatgtttt

SEQ ID NO: 35589 - DNA, 25 bp, synthetic construct
  misc_feature 1..25: note = Oligonucleotide
  source 1..25: mol_type = other DNA
gtgacaatttactttattttaatgt

SEQ ID NO: 35590 - DNA, 25 bp, synthetic construct
  misc_feature 1..25: note = Oligonucleotide
  source 1..25: mol_type = other DNA
tttgtgacaatttactttattttaa

SEQ ID NO: 35591 - DNA, 25 bp, synthetic construct
  misc_feature 1..25: note = Oligonucleotide
  source 1..25: mol_type = other DNA
atctttgtgacaatttactttattt

SEQ ID NO: 35592 - DNA, 25 bp, synthetic construct
  misc_feature 1..25: note = Oligonucleotide
  source 1..25: mol_type = other DNA
ttaatctttgtgacaatttacttta

SEQ ID NO: 35593 - DNA, 25 bp, synthetic construct
  misc_feature 1..25: note = Oligonucleotide
  source 1..25: mol_type = other DNA
cttttaatctttgtgacaatttact

SEQ ID NO: 35594 - DNA, 25 bp, synthetic construct
  misc_feature 1..25: note = Oligonucleotide
  source 1..25: mol_type = other DNA
gttcttttaatctttgtgacaattt

SEQ ID NO: 35595 - DNA, 25 bp, synthetic construct
  misc_feature 1..25: note = Oligonucleotide
  source 1..25: mol_type = other DNA
ttagttcttttaatctttgtgacaa

SEQ ID NO: 35596 - DNA, 25 bp, synthetic construct
  misc_feature 1..25: note = Oligonucleotide
  source 1..25: mol_type = other DNA
ctgttagttcttttaatctttgtga

SEQ ID NO: 35597 - DNA, 25 bp, synthetic construct
  misc_feature 1..25: note = Oligonucleotide
  source 1..25: mol_type = other DNA
gttctgttagttcttttaatctttg

SEQ ID NO: 35598 - DNA, 25 bp, synthetic construct
  misc_feature 1..25: note = Oligonucleotide
  source 1..25: mol_type = other DNA
ttagttctgttagttcttttaatct

SEQ ID NO: 35599 - DNA, 25 bp, synthetic construct
  misc_feature 1..25: note = Oligonucleotide
  source 1..25: mol_type = other DNA
tcattagttctgttagttcttttaa

SEQ ID NO: 35600 - DNA, 25 bp, synthetic construct
  misc_feature 1..25: note = Oligonucleotide
  source 1..25: mol_type = other DNA
ctctcattagttctgttagttcttt

SEQ ID NO: 35601 - DNA, 25 bp, synthetic construct
  misc_feature 1..25: note = Oligonucleotide
  source 1..25: mol_type = other DNA
attctctcattagttctgttagttc

SEQ ID NO: 35602 - DNA, 25 bp, synthetic construct
  misc_feature 1..25: note = Oligonucleotide
  source 1..25: mol_type = other DNA
cctattctctcattagttctgttag

SEQ ID NO: 35603 - DNA, 25 bp, synthetic construct
  misc_feature 1..25: note = Oligonucleotide
  source 1..25: mol_type = other DNA
tgtcctattctctcattagttctgt

SEQ ID NO: 35604 - DNA, 25 bp, synthetic construct
  misc_feature 1..25: note = Oligonucleotide
  source 1..25: mol_type = other DNA
ttctgtcctattctctcattagttc

SEQ ID NO: 35605 - DNA, 25 bp, synthetic construct
  misc_feature 1..25: note = Oligonucleotide
  source 1..25: mol_type = other DNA
ttgttctgtcctattctctcattag

SEQ ID NO: 35606 - DNA, 25 bp, synthetic construct
  misc_feature 1..25: note = Oligonucleotide
  source 1..25: mol_type = other DNA
tgtttgttctgtcctattctctcat

SEQ ID NO: 35607 - DNA, 25 bp, synthetic construct
  misc_feature 1..25: note = Oligonucleotide
  source 1..25: mol_type = other DNA
gcttgtttgttctgtcctattctct

SEQ ID NO: 35608 - DNA, 25 bp, synthetic construct
  misc_feature 1..25: note = Oligonucleotide
  source 1..25: mol_type = other DNA
tttgcttgtttgttctgtcctattc

SEQ ID NO: 35609 - DNA, 25 bp, synthetic construct
  misc_feature 1..25: note = Oligonucleotide
  source 1..25: mol_type = other DNA
ttttttgcttgtttgttctgtccta

SEQ ID NO: 35610 - DNA, 25 bp, synthetic construct
  misc_feature 1..25: note = Oligonucleotide
  source 1..25: mol_type = other DNA
tctttttttgcttgtttgttctgtc

SEQ ID NO: 35611 - DNA, 25 bp, synthetic construct
  misc_feature 1..25: note = Oligonucleotide
  source 1..25: mol_type = other DNA
tattctttttttgcttgtttgttct

SEQ ID NO: 35612 - DNA, 25 bp, synthetic construct
  misc_feature 1..25: note = Oligonucleotide
  source 1..25: mol_type = other DNA
gcttattctttttttgcttgtttgt

SEQ ID NO: 35613 - DNA, 25 bp, synthetic construct
  misc_feature 1..25: note = Oligonucleotide
  source 1..25: mol_type = other DNA
tgtgcttattctttttttgcttgtt

SEQ ID NO: 35614 - DNA, 25 bp, synthetic construct
  misc_feature 1..25: note = Oligonucleotide
  source 1..25: mol_type = other DNA
aaatgtgcttattctttttttgctt

SEQ ID NO: 35615 - DNA, 25 bp, synthetic construct
  misc_feature 1..25: note = Oligonucleotide
  source 1..25: mol_type = other DNA
ctaaaatgtgcttattctttttttg

SEQ ID NO: 35616 - DNA, 25 bp, synthetic construct
  misc_feature 1..25: note = Oligonucleotide
  source 1..25: mol_type = other DNA
attctaaaatgtgcttattcttttt

SEQ ID NO: 35617 - DNA, 25 bp, synthetic construct
  misc_feature 1..25: note = Oligonucleotide
  source 1..25: mol_type = other DNA
atcattctaaaatgtgcttattctt

SEQ ID NO: 35618 - DNA, 25 bp, synthetic construct
  misc_feature 1..25: note = Oligonucleotide
  source 1..25: mol_type = other DNA
agaatcattctaaaatgtgcttatt

SEQ ID NO: 35619 - DNA, 25 bp, synthetic construct
  misc_feature 1..25: note = Oligonucleotide
  source 1..25: mol_type = other DNA
aaaagaatcattctaaaatgtgctt

SEQ ID NO: 35620 - DNA, 25 bp, synthetic construct
  misc_feature 1..25: note = Oligonucleotide
  source 1..25: mol_type = other DNA
aaaaaaagaatcattctaaaatgtg

SEQ ID NO: 35621 - DNA, 25 bp, synthetic construct
  misc_feature 1..25: note = Oligonucleotide
  source 1..25: mol_type = other DNA
aaaaaaaaaagaatcattctaaaat

SEQ ID NO: 35622 - DNA, 25 bp, synthetic construct
  misc_feature 1..25: note = Oligonucleotide
  source 1..25: mol_type = other DNA
aaaaaaaaaaaaagaatcattctaa

SEQ ID NO: 35623 - DNA, 25 bp, synthetic construct
  misc_feature 1..25: note = Oligonucleotide
  source 1..25: mol_type = other DNA
aaaaaaaaaaaaaaaagaatcattc

SEQ ID NO: 35624 - DNA, 25 bp, synthetic construct
  misc_feature 1..25: note = Oligonucleotide
  source 1..25: mol_type = other DNA
aaaaaaaaaaaaaaaaaaagaatca

SEQ ID NO: 35625 - DNA, 25 bp, synthetic construct
  misc_feature 1..25: note = Oligonucleotide
  source 1..25: mol_type = other DNA
aaaaaaaaaaaaaaaaaaaaaagaa

SEQ ID NO: 35626 - DNA, 25 bp, synthetic construct
  misc_feature 1..25: note = Oligonucleotide
  source 1..25: mol_type = other DNA
tctaaaaaaaaaaaaaaaaaaaaaa

SEQ ID NO: 35627 - DNA, 25 bp, synthetic construct
  misc_feature 1..25: note = Oligonucleotide
  source 1..25: mol_type = other DNA
cagtctaaaaaaaaaaaaaaaaaaa

SEQ ID NO: 35628 - DNA, 25 bp, synthetic construct
  misc_feature 1..25: note = Oligonucleotide
  source 1..25: mol_type = other DNA
actcagtctaaaaaaaaaaaaaaaa

SEQ ID NO: 35629 - DNA, 25 bp, synthetic construct
  misc_feature 1..25: note = Oligonucleotide
  source 1..25: mol_type = other DNA
gagactcagtctaaaaaaaaaaaaa

SEQ ID NO: 35630 - DNA, 25 bp, synthetic construct
  misc_feature 1..25: note = Oligonucleotide
  source 1..25: mol_type = other DNA
aacgagactcagtctaaaaaaaaaa

SEQ ID NO: 35631 - DNA, 25 bp, synthetic construct
  misc_feature 1..25: note = Oligonucleotide
  source 1..25: mol_type = other DNA
tagaacgagactcagtctaaaaaaa

SEQ ID NO: 35632 - DNA, 25 bp, synthetic construct
  misc_feature 1..25: note = Oligonucleotide
  source 1..25: mol_type = other DNA
taatagaacgagactcagtctaaaa

SEQ ID NO: 35633 - DNA, 25 bp, synthetic construct
  misc_feature 1..25: note = Oligonucleotide
  source 1..25: mol_type = other DNA
tggtaatagaacgagactcagtcta

SEQ ID NO: 35634 - DNA, 25 bp, synthetic construct
  misc_feature 1..25: note = Oligonucleotide
  source 1..25: mol_type = other DNA
agctggtaatagaacgagactcagt

SEQ ID NO: 35635 - DNA, 25 bp, synthetic construct
  misc_feature 1..25: note = Oligonucleotide
  source 1..25: mol_type = other DNA
tccagctggtaatagaacgagactc

SEQ ID NO: 35636 - DNA, 25 bp, synthetic construct
  misc_feature 1..25: note = Oligonucleotide
  source 1..25: mol_type = other DNA
cactccagctggtaatagaacgaga

SEQ ID NO: 35637 - DNA, 25 bp, synthetic construct
  misc_feature 1..25: note = Oligonucleotide
  source 1..25: mol_type = other DNA
ctgcactccagctggtaatagaacg

SEQ ID NO: 35638 - DNA, 25 bp, synthetic construct
  misc_feature 1..25: note = Oligonucleotide
  source 1..25: mol_type = other DNA
ccactgcactccagctggtaataga

SEQ ID NO: 35639 - DNA, 25 bp, synthetic construct
  misc_feature 1..25: note = Oligonucleotide
  source 1..25: mol_type = other DNA
gcgccactgcactccagctggtaat

SEQ ID NO: 35640 - DNA, 25 bp, synthetic construct
  misc_feature 1..25: note = Oligonucleotide
  source 1..25: mol_type = other DNA
atcgcgccactgcactccagctggt

SEQ ID NO: 35641 - DNA, 25 bp, synthetic construct
  misc_feature 1..25: note = Oligonucleotide
  source 1..25: mol_type = other DNA
gagatcgcgccactgcactccagct

SEQ ID NO: 35642 - DNA, 25 bp, synthetic construct
  misc_feature 1..25: note = Oligonucleotide
  source 1..25: mol_type = other DNA
gccgagatcgcgccactgcactcca

SEQ ID NO: 35643 - DNA, 25 bp, synthetic construct
  misc_feature 1..25: note = Oligonucleotide
  source 1..25: mol_type = other DNA
tgagccgagatcgcgccactgcact

SEQ ID NO: 35644 - DNA, 25 bp, synthetic construct
  misc_feature 1..25: note = Oligonucleotide
  source 1..25: mol_type = other DNA
cagtgagccgagatcgcgccactgc

SEQ ID NO: 35645 - DNA, 25 bp, synthetic construct
  misc_feature 1..25: note = Oligonucleotide
  source 1..25: mol_type = other DNA
atgcagtgagccgagatcgcgccac

SEQ ID NO: 35646 - DNA, 25 bp, synthetic construct
  misc_feature 1..25: note = Oligonucleotide
  source 1..25: mol_type = other DNA
aggatgcagtgagccgagatcgcgc

SEQ ID NO: 35647 - DNA, 25 bp, synthetic construct
  misc_feature 1..25: note = Oligonucleotide
  source 1..25: mol_type = other DNA
cggaggatgcagtgagccgagatcg

SEQ ID NO: 35648 - DNA, 25 bp, synthetic construct
  misc_feature 1..25: note = Oligonucleotide
  source 1..25: mol_type = other DNA
aggcggaggatgcagtgagccgaga

SEQ ID NO: 35649 - DNA, 25 bp, synthetic construct
  misc_feature 1..25: note = Oligonucleotide
  source 1..25: mol_type = other DNA
gggaggcggaggatgcagtgagccg

SEQ ID NO: 35650 - DNA, 25 bp, synthetic construct
  misc_feature 1..25: note = Oligonucleotide
  source 1..25: mol_type = other DNA
cccgggaggcggaggatgcagtgag

SEQ ID NO: 35651 - DNA, 25 bp, synthetic construct
  misc_feature 1..25: note = Oligonucleotide
  source 1..25: mol_type = other DNA
gaacccgggaggcggaggatgcagt

SEQ ID NO: 35652 - DNA, 25 bp, synthetic construct
  misc_feature 1..25: note = Oligonucleotide
  source 1..25: mol_type = other DNA
cttgaacccgggaggcggaggatgc

SEQ ID NO: 35653 - DNA, 25 bp, synthetic construct
  misc_feature 1..25: note = Oligonucleotide
  source 1..25: mol_type = other DNA
tcacttgaacccgggaggcggagga

SEQ ID NO: 35654 - DNA, 25 bp, synthetic construct
  misc_feature 1..25: note = Oligonucleotide
  source 1..25: mol_type = other DNA
gaatcacttgaacccgggaggcgga

SEQ ID NO: 35655 - DNA, 25 bp, synthetic construct
  misc_feature 1..25: note = Oligonucleotide
  source 1..25: mol_type = other DNA
agagaatcacttgaacccgggaggc

SEQ ID NO: 35656 - DNA, 25 bp, synthetic construct
  misc_feature 1..25: note = Oligonucleotide
  source 1..25: mol_type = other DNA
ccaagagaatcacttgaacccggga

SEQ ID NO: 35657 - DNA, 25 bp, synthetic construct
  misc_feature 1..25: note = Oligonucleotide
  source 1..25: mol_type = other DNA
gagccaagagaatcacttgaacccg

SEQ ID NO: 35658 - DNA, 25 bp, synthetic construct
  misc_feature 1..25: note = Oligonucleotide
  source 1..25: mol_type = other DNA
gctgagccaagagaatcacttgaac

SEQ ID NO: 35659 - DNA, 25 bp, synthetic construct
  misc_feature 1..25: note = Oligonucleotide
  source 1..25: mol_type = other DNA
gaggctgagccaagagaatcacttg

SEQ ID NO: 35660 - DNA, 25 bp, synthetic construct
  misc_feature 1..25: note = Oligonucleotide
  source 1..25: mol_type = other DNA
caggaggctgagccaagagaatcac

SEQ ID NO: 35661 - DNA, 25 bp, synthetic construct
  misc_feature 1..25: note = Oligonucleotide
  source 1..25: mol_type = other DNA
actcaggaggctgagccaagagaat

SEQ ID NO: 35662 - DNA, 25 bp, synthetic construct
  misc_feature 1..25: note = Oligonucleotide
  source 1..25: mol_type = other DNA
gctactcaggaggctgagccaagag

SEQ ID NO: 35663 - DNA, 25 bp, synthetic construct
  misc_feature 1..25: note = Oligonucleotide
  source 1..25: mol_type = other DNA
ccagctactcaggaggctgagccaa

SEQ ID NO: 35664 - DNA, 25 bp, synthetic construct
  misc_feature 1..25: note = Oligonucleotide
  source 1..25: mol_type = other DNA
atcccagctactcaggaggctgagc

SEQ ID NO: 35665 - DNA, 25 bp, synthetic construct
  misc_feature 1..25: note = Oligonucleotide
  source 1..25: mol_type = other DNA
gtaatcccagctactcaggaggctg

SEQ ID NO: 35666 - DNA, 25 bp, synthetic construct
  misc_feature 1..25: note = Oligonucleotide
  source 1..25: mol_type = other DNA
cctgtaatcccagctactcaggagg

SEQ ID NO: 35667 - DNA, 25 bp, synthetic construct
  misc_feature 1..25: note = Oligonucleotide
  source 1..25: mol_type = other DNA
gcgcctgtaatcccagctactcagg

SEQ ID NO: 35668 - DNA, 25 bp, synthetic construct
  misc_feature 1..25: note = Oligonucleotide
  source 1..25: mol_type = other DNA
tgtgcgcctgtaatcccagctactc

SEQ ID NO: 35669 - DNA, 25 bp, synthetic construct
  misc_feature 1..25: note = Oligonucleotide
  source 1..25: mol_type = other DNA
tgttgtgcgcctgtaatcccagcta

SEQ ID NO: 35670 - DNA, 25 bp, synthetic construct
  misc_feature 1..25: note = Oligonucleotide
  source 1..25: mol_type = other DNA
tggtgttgtgcgcctgtaatcccag

SEQ ID NO: 35671 - DNA, 25 bp, synthetic construct
  misc_feature 1..25: note = Oligonucleotide
  source 1..25: mol_type = other DNA
gtgtggtgttgtgcgcctgtaatcc

SEQ ID NO: 35672 - DNA, 25 bp, synthetic construct
  misc_feature 1..25: note = Oligonucleotide
  source 1..25: mol_type = other DNA
tgggtgtggtgttgtgcgcctgtaa

SEQ ID NO: 35673 - DNA, 25 bp, synthetic construct
  misc_feature 1..25: note = Oligonucleotide
  source 1..25: mol_type = other DNA
agctgggtgtggtgttgtgcgcctg

SEQ ID NO: 35674 - DNA, 25 bp, synthetic construct
  misc_feature 1..25: note = Oligonucleotide
  source 1..25: mol_type = other DNA
attagctgggtgtggtgttgtgcgc

SEQ ID NO: 35675 - DNA, 25 bp, synthetic construct
  misc_feature 1..25: note = Oligonucleotide
  source 1..25: mol_type = other DNA
aaaattagctgggtgtggtgttgtg

SEQ ID NO: 35676 - DNA, 25 bp, synthetic construct
  misc_feature 1..25: note = Oligonucleotide
  source 1..25: mol_type = other DNA
caaaaaattagctgggtgtggtgtt

SEQ ID NO: 35677 - DNA, 25 bp, synthetic construct
  misc_feature 1..25: note = Oligonucleotide
  source 1..25: mol_type = other DNA
atacaaaaaattagctgggtgtggt

SEQ ID NO: 35678 - DNA, 25 bp, synthetic construct
  misc_feature 1..25: note = Oligonucleotide
  source 1..25: mol_type = other DNA
aaaatacaaaaaattagctgggtgt

SEQ ID NO: 35679 - DNA, 25 bp, synthetic construct
  misc_feature 1..25: note = Oligonucleotide
  source 1..25: mol_type = other DNA
ctaaaaatacaaaaaattagctggg

SEQ ID NO: 35680 - DNA, 25 bp, synthetic construct
  misc_feature 1..25: note = Oligonucleotide
  source 1..25: mol_type = other DNA
ctactaaaaatacaaaaaattagct

SEQ ID NO: 35681 - DNA, 25 bp, synthetic construct
  misc_feature 1..25: note = Oligonucleotide
  source 1..25: mol_type = other DNA
tctctactaaaaatacaaaaaatta

SEQ ID NO: 35682 - DNA, 25 bp, synthetic construct
  misc_feature 1..25: note = Oligonucleotide
  source 1..25: mol_type = other DNA
ccatctctactaaaaatacaaaaaa

SEQ ID NO: 35683 - DNA, 25 bp, synthetic construct
  misc_feature 1..25: note = Oligonucleotide
  source 1..25: mol_type = other DNA
accccatctctactaaaaatacaaa

SEQ ID NO: 35684 - DNA, 25 bp, synthetic construct
  misc_feature 1..25: note = Oligonucleotide
  source 1..25: mol_type = other DNA
gaaaccccatctctactaaaaatac

SEQ ID NO: 35685 - DNA, 25 bp, synthetic construct
  misc_feature 1..25: note = Oligonucleotide
  source 1..25: mol_type = other DNA
ggtgaaaccccatctctactaaaaa

SEQ ID NO: 35686 - DNA, 25 bp, synthetic construct
  misc_feature 1..25: note = Oligonucleotide
  source 1..25: mol_type = other DNA
catggtgaaaccccatctctactaa

SEQ ID NO: 35687 - DNA, 25 bp, synthetic construct
  misc_feature 1..25: note = Oligonucleotide
  source 1..25: mol_type = other DNA
caacatggtgaaaccccatctctac

SEQ ID NO: 35688 - DNA, 25 bp, synthetic construct
  misc_feature 1..25: note = Oligonucleotide
  source 1..25: mol_type = other DNA
ggccaacatggtgaaaccccatctc

SEQ ID NO: 35689 - DNA, 25 bp, synthetic construct
  misc_feature 1..25: note = Oligonucleotide
  source 1..25: mol_type = other DNA
cctggccaacatggtgaaaccccat

SEQ ID NO: 35690 - DNA, 25 bp, synthetic construct
  misc_feature 1..25: note = Oligonucleotide
  source 1..25: mol_type = other DNA
cagcctggccaacatggtgaaaccc

SEQ ID NO: 35691 - DNA, 25 bp, synthetic construct
  misc_feature 1..25: note = Oligonucleotide
  source 1..25: mol_type = other DNA
gaccagcctggccaacatggtgaaa

SEQ ID NO: 35692 - DNA, 25 bp, synthetic construct
  misc_feature 1..25: note = Oligonucleotide
  source 1..25: mol_type = other DNA
cgagaccagcctggccaacatggtg

SEQ ID NO: 35693 - DNA, 25 bp, synthetic construct
  misc_feature 1..25: note = Oligonucleotide
  source 1..25: mol_type = other DNA
gttcgagaccagcctggccaacatg

SEQ ID NO: 35694 - DNA, 25 bp, synthetic construct
  misc_feature 1..25: note = Oligonucleotide
  source 1..25: mol_type = other DNA
gcagttcgagaccagcctggccaac

SEQ ID NO: 35695 - DNA, 25 bp, synthetic construct
  misc_feature 1..25: note = Oligonucleotide
  source 1..25: mol_type = other DNA
tcagcagttcgagaccagcctggcc

SEQ ID NO: 35696 - DNA, 25 bp, synthetic construct
  misc_feature 1..25: note = Oligonucleotide
  source 1..25: mol_type = other DNA
aggtcagcagttcgagaccagcctg

SEQ ID NO: 35697 - DNA, 25 bp, synthetic construct
  misc_feature 1..25: note = Oligonucleotide
  source 1..25: mol_type = other DNA
acaaggtcagcagttcgagaccagc

SEQ ID NO: 35698 - DNA, 25 bp, synthetic construct
  misc_feature 1..25: note = Oligonucleotide
  source 1..25: mol_type = other DNA
atcacaaggtcagcagttcgagacc

SEQ ID NO: 35699 - DNA, 25 bp, synthetic construct
  misc_feature 1..25: note = Oligonucleotide
  source 1..25: mol_type = other DNA
tgaatcacaaggtcagcagttcgag

SEQ ID NO: 35700 - DNA, 25 bp, synthetic construct
  misc_feature 1..25: note = Oligonucleotide
  source 1..25: mol_type = other DNA
aggtgaatcacaaggtcagcagttc

SEQ ID NO: 35701 - DNA, 25 bp, synthetic construct
  misc_feature 1..25: note = Oligonucleotide
  source 1..25: mol_type = other DNA
ggcaggtgaatcacaaggtcagcag

SEQ ID NO: 35702 - DNA, 25 bp, synthetic construct
  misc_feature 1..25: note = Oligonucleotide
  source 1..25: mol_type = other DNA
cgaggcaggtgaatcacaaggtcag

SEQ ID NO: 35703 - DNA, 25 bp, synthetic construct
  misc_feature 1..25: note = Oligonucleotide
  source 1..25: mol_type = other DNA
ggccgaggcaggtgaatcacaaggt

SEQ ID NO: 35704 - DNA, 25 bp, synthetic construct
  misc_feature 1..25: note = Oligonucleotide
  source 1..25: mol_type = other DNA
ggaggccgaggcaggtgaatcacaa

SEQ ID NO: 35705 - DNA, 25 bp, synthetic construct
  misc_feature 1..25: note = Oligonucleotide
  source 1..25: mol_type = other DNA
ttgggaggccgaggcaggtgaatca

SEQ ID NO: 35706 - DNA, 25 bp, synthetic construct
  misc_feature 1..25: note = Oligonucleotide
  source 1..25: mol_type = other DNA
actttgggaggccgaggcaggtgaa

SEQ ID NO: 35707 - DNA, 25 bp, synthetic construct
  misc_feature 1..25: note = Oligonucleotide
  source 1..25: mol_type = other DNA
agcactttgggaggccgaggcaggt

SEQ ID NO: 35708 - DNA, 25 bp, synthetic construct
  misc_feature 1..25: note = Oligonucleotide
  source 1..25: mol_type = other DNA
cccagcactttgggaggccgaggca

SEQ ID NO: 35709 - DNA, 25 bp, synthetic construct
  misc_feature 1..25: note = Oligonucleotide
  source 1..25: mol_type = other DNA
aatcccagcactttgggaggccgag

SEQ ID NO: 35710 - DNA, 25 bp, synthetic construct
  misc_feature 1..25: note = Oligonucleotide
  source 1..25: mol_type = other DNA
tgtaatcccagcactttgggaggcc

SEQ ID NO: 35711 - DNA, 25 bp, synthetic construct
  misc_feature 1..25: note = Oligonucleotide
  source 1..25: mol_type = other DNA
gcctgtaatcccagcactttgggag

SEQ ID NO: 35712 - DNA, 25 bp, synthetic construct
  misc_feature 1..25: note = Oligonucleotide
  source 1..25: mol_type = other DNA
cacgcctgtaatcccagcactttgg

SEQ ID NO: 35713 - DNA, 25 bp, synthetic construct
  misc_feature 1..25: note = Oligonucleotide
  source 1..25: mol_type = other DNA
gctcacgcctgtaatcccagcactt

SEQ ID NO: 35714 - DNA, 25 bp, synthetic construct
  misc_feature 1..25: note = Oligonucleotide
  source 1..25: mol_type = other DNA
gtggctcacgcctgtaatcccagca

SEQ ID NO: 35715 - DNA, 25 bp, synthetic construct
  misc_feature 1..25: note = Oligonucleotide
  source 1..25: mol_type = other DNA
gcagtggctcacgcctgtaatccca

SEQ ID NO: 35716 - DNA, 25 bp, synthetic construct
  misc_feature 1..25: note = Oligonucleotide
  source 1..25: mol_type = other DNA
ggcgcagtggctcacgcctgtaatc

SEQ ID NO: 35717 - DNA, 25 bp, synthetic construct
  misc_feature 1..25: note = Oligonucleotide
  source 1..25: mol_type = other DNA
ctgggcgcagtggctcacgcctgta

SEQ ID NO: 35718 - DNA, 25 bp, synthetic construct
  misc_feature 1..25: note = Oligonucleotide
  source 1..25: mol_type = other DNA
tggctgggcgcagtggctcacgcct

SEQ ID NO: 35719 - DNA, 25 bp, synthetic construct
  misc_feature 1..25: note = Oligonucleotide
  source 1..25: mol_type = other DNA
ttctggctgggcgcagtggctcacg

SEQ ID NO: 35720 - DNA, 25 bp, synthetic construct
  misc_feature 1..25: note = Oligonucleotide
  source 1..25: mol_type = other DNA
tccttctggctgggcgcagtggctc

SEQ ID NO: 35721 - DNA, 25 bp, synthetic construct
  misc_feature 1..25: note = Oligonucleotide
  source 1..25: mol_type = other DNA
gaatccttctggctgggcgcagtgg

SEQ ID NO: 35722 - DNA, 25 bp, synthetic construct
  misc_feature 1..25: note = Oligonucleotide
  source 1..25: mol_type = other DNA
taagaatccttctggctgggcgcag

SEQ ID NO: 35723 - DNA, 25 bp, synthetic construct
  misc_feature 1..25: note = Oligonucleotide
  source 1..25: mol_type = other DNA
ctttaagaatccttctggctgggcg

SEQ ID NO: 35724 - DNA, 25 bp, synthetic construct
  misc_feature 1..25: note = Oligonucleotide
  source 1..25: mol_type = other DNA
gttctttaagaatccttctggctgg

SEQ ID NO: 35725 - DNA, 25 bp, synthetic construct
  misc_feature 1..25: note = Oligonucleotide
  source 1..25: mol_type = other DNA
acagttctttaagaatccttctggc

SEQ ID NO: 35726 - DNA, 25 bp, synthetic construct
  misc_feature 1..25: note = Oligonucleotide
  source 1..25: mol_type = other DNA
ataacagttctttaagaatccttct

SEQ ID NO: 35727 - DNA, 25 bp, synthetic construct
  misc_feature 1..25: note = Oligonucleotide
  source 1..25: mol_type = other DNA
tcaataacagttctttaagaatcct

SEQ ID NO: 35728 - DNA, 25 bp, synthetic construct
  misc_feature 1..25: note = Oligonucleotide
  source 1..25: mol_type = other DNA
gtttcaataacagttctttaagaat

SEQ ID NO: 35729 - DNA, 25 bp, synthetic construct
  misc_feature 1..25: note = Oligonucleotide
  source 1..25: mol_type = other DNA
tttgtttcaataacagttctttaag

SEQ ID NO: 35730 - DNA, 25 bp, synthetic construct
  misc_feature 1..25: note = Oligonucleotide
  source 1..25: mol_type = other DNA
ctttttgtttcaataacagttcttt

SEQ ID NO: 35731 - DNA, 25 bp, synthetic construct
  misc_feature 1..25: note = Oligonucleotide
  source 1..25: mol_type = other DNA
acactttttgtttcaataacagttc

SEQ ID NO: 35732 - DNA, 25 bp, synthetic construct
  misc_feature 1..25: note = Oligonucleotide
  source 1..25: mol_type = other DNA
actacactttttgtttcaataacag

SEQ ID NO: 35733 - DNA, 25 bp, synthetic construct
  misc_feature 1..25: note = Oligonucleotide
  source 1..25: mol_type = other DNA
gtgactacactttttgtttcaataa

SEQ ID NO: 35734 - DNA, 25 bp, synthetic construct
  misc_feature 1..25: note = Oligonucleotide
  source 1..25: mol_type = other DNA
tcagtgactacactttttgtttcaa

SEQ ID NO: 35735 - DNA, 25 bp, synthetic construct
  misc_feature 1..25: note = Oligonucleotide
  source 1..25: mol_type = other DNA
atctcagtgactacactttttgttt

SEQ ID NO: 35736 - DNA, 25 bp, synthetic construct
  misc_feature 1..25: note = Oligonucleotide
  source 1..25: mol_type = other DNA
tttatctcagtgactacactttttg

SEQ ID NO: 35737 - DNA, 25 bp, synthetic construct
  misc_feature 1..25: note = Oligonucleotide
  source 1..25: mol_type = other DNA
ttttttatctcagtgactacacttt

SEQ ID NO: 35738 - DNA, 25 bp, synthetic construct
  misc_feature 1..25: note = Oligonucleotide
  source 1..25: mol_type = other DNA
ttcttttttatctcagtgactacac

SEQ ID NO: 35739 - DNA, 25 bp, synthetic construct
  misc_feature 1..25: note = Oligonucleotide
  source 1..25: mol_type = other DNA
gctttcttttttatctcagtgacta

SEQ ID NO: 35740 - DNA, 25 bp, synthetic construct
  misc_feature 1..25: note = Oligonucleotide
  source 1..25: mol_type = other DNA
atggctttcttttttatctcagtga

SEQ ID NO: 35741 - DNA, 25 bp, synthetic construct
  misc_feature 1..25: note = Oligonucleotide
  source 1..25: mol_type = other DNA
ggcatggctttcttttttatctcag

SEQ ID NO: 35742 - DNA, 25 bp, synthetic construct
  misc_feature 1..25: note = Oligonucleotide
  source 1..25: mol_type = other DNA
ccaggcatggctttcttttttatct

SEQ ID NO: 35743 - DNA, 25 bp, synthetic construct
  misc_feature 1..25: note = Oligonucleotide
  source 1..25: mol_type = other DNA
atcccaggcatggctttctttttta

SEQ ID NO: 35744 - DNA, 25 bp, synthetic construct
  misc_feature 1..25: note = Oligonucleotide
  source 1..25: mol_type = other DNA
tttatcccaggcatggctttctttt

SEQ ID NO: 35745 - DNA, 25 bp, synthetic construct
  misc_feature 1..25: note = Oligonucleotide
  source 1..25: mol_type = other DNA
ctgtttatcccaggcatggctttct

SEQ ID NO: 35746 - DNA, 25 bp, synthetic construct
  misc_feature 1..25: note = Oligonucleotide
  source 1..25: mol_type = other DNA
gtactgtttatcccaggcatggctt

SEQ ID NO: 35747 - DNA, 25 bp, synthetic construct
  misc_feature 1..25: note = Oligonucleotide
  source 1..25: mol_type = other DNA
agtgtactgtttatcccaggcatgg

SEQ ID NO: 35748 - DNA, 25 bp, synthetic construct
  misc_feature 1..25: note = Oligonucleotide
  source 1..25: mol_type = other DNA
tctagtgtactgtttatcccaggca

SEQ ID NO: 35749 - DNA, 25 bp, synthetic construct
  misc_feature 1..25: note = Oligonucleotide
  source 1..25: mol_type = other DNA
gggtctagtgtactgtttatcccag

SEQ ID NO: 35750 - DNA, 25 bp, synthetic construct
  misc_feature 1..25: note = Oligonucleotide
  source 1..25: mol_type = other DNA
cctgggtctagtgtactgtttatcc

SEQ ID NO: 35751 - DNA, 25 bp, synthetic construct
  misc_feature 1..25: note = Oligonucleotide
  source 1..25: mol_type = other DNA
tcacctgggtctagtgtactgttta

SEQ ID NO: 35752 - DNA, 25 bp, synthetic construct
  misc_feature 1..25: note = Oligonucleotide
  source 1..25: mol_type = other DNA
tcttcacctgggtctagtgtactgt

SEQ ID NO: 35753 - DNA, 25 bp, synthetic construct
  misc_feature 1..25: note = Oligonucleotide
  source 1..25: mol_type = other DNA
ctttcttcacctgggtctagtgtac

SEQ ID NO: 35754 - DNA, 25 bp, synthetic construct
  misc_feature 1..25: note = Oligonucleotide
  source 1..25: mol_type = other DNA
tttctttcttcacctgggtctagtg

SEQ ID NO: 35755 - DNA, 25 bp, synthetic construct
  misc_feature 1..25: note = Oligonucleotide
  source 1..25: mol_type = other DNA
ctgtttctttcttcacctgggtcta

SEQ ID NO: 35756 - DNA, 25 bp, synthetic construct
  misc_feature 1..25: note = Oligonucleotide
  source 1..25: mol_type = other DNA
ttgctgtttctttcttcacctgggt

SEQ ID NO: 35757 - DNA, 25 bp, synthetic construct
  misc_feature 1..25: note = Oligonucleotide
  source 1..25: mol_type = other DNA
aacttgctgtttctttcttcacctg

SEQ ID NO: 35758 - DNA, 25 bp, synthetic construct
  misc_feature 1..25: note = Oligonucleotide
  source 1..25: mol_type = other DNA
tctaacttgctgtttctttcttcac

SEQ ID NO: 35759 - DNA, 25 bp, synthetic construct
  misc_feature 1..25: note = Oligonucleotide
  source 1..25: mol_type = other DNA
tcttctaacttgctgtttctttctt

SEQ ID NO: 35760 - DNA, 25 bp, synthetic construct
  misc_feature 1..25: note = Oligonucleotide
  source 1..25: mol_type = other DNA
ttatcttctaacttgctgtttcttt

SEQ ID NO: 35761 - DNA, 25 bp, synthetic construct
  misc_feature 1..25: note = Oligonucleotide
  source 1..25: mol_type = other DNA
gatttatcttctaacttgctgtttc

SEQ ID NO: 35762 - DNA, 25 bp, synthetic construct
  misc_feature 1..25: note = Oligonucleotide
  source 1..25: mol_type = other DNA
tcagatttatcttctaacttgctgt

SEQ ID NO: 35763 - DNA, 25 bp, synthetic construct
  misc_feature 1..25: note = Oligonucleotide
  source 1..25: mol_type = other DNA
acctcagatttatcttctaacttgc

SEQ ID NO: 35764 - DNA, 25 bp, synthetic construct
  misc_feature 1..25: note = Oligonucleotide
  source 1..25: mol_type = other DNA
gtaacctcagatttatcttctaact

SEQ ID NO: 35765 - DNA, 25 bp, synthetic construct
  misc_feature 1..25: note = Oligonucleotide
  source 1..25: mol_type = other DNA
tgggtaacctcagatttatcttcta

SEQ ID NO: 35766 - DNA, 25 bp, synthetic construct
  misc_feature 1..25: note = Oligonucleotide
  source 1..25: mol_type = other DNA
ttctgggtaacctcagatttatctt

SEQ ID NO: 35767 - DNA, 25 bp, synthetic construct
  misc_feature 1..25: note = Oligonucleotide
  source 1..25: mol_type = other DNA
atattctgggtaacctcagatttat

SEQ ID NO: 35768 - DNA, 25 bp, synthetic construct
  misc_feature 1..25: note = Oligonucleotide
  source 1..25: mol_type = other DNA
gctatattctgggtaacctcagatt

SEQ ID NO: 35769 - DNA, 25 bp, synthetic construct
  misc_feature 1..25: note = Oligonucleotide
  source 1..25: mol_type = other DNA
tgtgctatattctgggtaacctcag

SEQ ID NO: 35770 - DNA, 25 bp, synthetic construct
  misc_feature 1..25: note = Oligonucleotide
  source 1..25: mol_type = other DNA
ttctgtgctatattctgggtaacct

SEQ ID NO: 35771 - DNA, 25 bp, synthetic construct
  misc_feature 1..25: note = Oligonucleotide
  source 1..25: mol_type = other DNA
tatttctgtgctatattctgggtaa

SEQ ID NO: 35772 - DNA, 25 bp, synthetic construct
  misc_feature 1..25: note = Oligonucleotide
  source 1..25: mol_type = other DNA
ttatatttctgtgctatattctggg

SEQ ID NO: 35773 - DNA, 25 bp, synthetic construct
  misc_feature 1..25: note = Oligonucleotide
  source 1..25: mol_type = other DNA
tccttatatttctgtgctatattct

SEQ ID NO: 35774 - DNA, 25 bp, synthetic construct
  misc_feature 1..25: note = Oligonucleotide
  source 1..25: mol_type = other DNA
atctccttatatttctgtgctatat

SEQ ID NO: 35775 - DNA, 25 bp, synthetic construct
  misc_feature 1..25: note = Oligonucleotide
  source 1..25: mol_type = other DNA
tctatctccttatatttctgtgcta

SEQ ID NO: 35776 - DNA, 25 bp, synthetic construct
  misc_feature 1..25: note = Oligonucleotide
  source 1..25: mol_type = other DNA
ttttctatctccttatatttctgtg

SEQ ID NO: 35777 - DNA, 25 bp, synthetic construct
  misc_feature 1..25: note = Oligonucleotide
  source 1..25: mol_type = other DNA
atattttctatctccttatatttct

SEQ ID NO: 35778 - DNA, 25 bp, synthetic construct
  misc_feature 1..25: note = Oligonucleotide
  source 1..25: mol_type = other DNA
ttgatattttctatctccttatatt

SEQ ID NO: 35779 - DNA, 25 bp, synthetic construct
  misc_feature 1..25: note = Oligonucleotide
  source 1..25: mol_type = other DNA
tctttgatattttctatctccttat

SEQ ID NO: 35780 - DNA, 25 bp, synthetic construct
  misc_feature 1..25: note = Oligonucleotide
  source 1..25: mol_type = other DNA
tgctctttgatattttctatctcct

SEQ ID NO: 35781 - DNA, 25 bp, synthetic construct
  misc_feature 1..25: note = Oligonucleotide
  source 1..25: mol_type = other DNA
aactgctctttgatattttctatct

SEQ ID NO: 35782 - DNA, 25 bp, synthetic construct
  misc_feature 1..25: note = Oligonucleotide
  source 1..25: mol_type = other DNA
cctaactgctctttgatattttcta

SEQ ID NO: 35783 - DNA, 25 bp, synthetic construct
  misc_feature 1..25: note = Oligonucleotide
  source 1..25: mol_type = other DNA
tgtcctaactgctctttgatatttt

SEQ ID NO: 35784 - DNA, 25 bp, synthetic construct
  misc_feature 1..25: note = Oligonucleotide
  source 1..25: mol_type = other DNA
gtgtgtcctaactgctctttgatat

SEQ ID NO: 35785 - DNA, 25 bp, synthetic construct
  misc_feature 1..25: note = Oligonucleotide
  source 1..25: mol_type = other DNA
tgtgtgtgtcctaactgctctttga

SEQ ID NO: 35786 - DNA, 25 bp, synthetic construct
  misc_feature 1..25: note = Oligonucleotide
  source 1..25: mol_type = other DNA
gtgtgtgtgtgtcctaactgctctt

SEQ ID NO: 35787 - DNA, 25 bp, synthetic construct
  misc_feature 1..25: note = Oligonucleotide
  source 1..25: mol_type = other DNA
tttgtgtgtgtgtgtcctaactgct

SEQ ID NO: 35788 - DNA, 25 bp, synthetic construct
  misc_feature 1..25: note = Oligonucleotide
  source 1..25: mol_type = other DNA
atttttgtgtgtgtgtgtcctaact

SEQ ID NO: 35789 - DNA, 25 bp, synthetic construct
  misc_feature 1..25: note = Oligonucleotide
  source 1..25: mol_type = other DNA
gtgatttttgtgtgtgtgtgtccta

SEQ ID NO: 35790 - DNA, 25 bp, synthetic construct
  misc_feature 1..25: note = Oligonucleotide
  source 1..25: mol_type = other DNA
tatgtgatttttgtgtgtgtgtgtc

SEQ ID NO: 35791 - DNA, 25 bp, synthetic construct
  misc_feature 1..25: note = Oligonucleotide
  source 1..25: mol_type = other DNA
atctatgtgatttttgtgtgtgtgt

SEQ ID NO: 35792 - DNA, 25 bp, synthetic construct
  misc_feature 1..25: note = Oligonucleotide
  source 1..25: mol_type = other DNA
attatctatgtgatttttgtgtgtg

SEQ ID NO: 35793 - DNA, 25 bp, synthetic construct
  misc_feature 1..25: note = Oligonucleotide
  source 1..25: mol_type = other DNA
tgaattatctatgtgatttttgtgt

SEQ ID NO: 35794 - DNA, 25 bp, synthetic construct
  misc_feature 1..25: note = Oligonucleotide
  source 1..25: mol_type = other DNA
cattgaattatctatgtgatttttg

SEQ ID NO: 35795 - DNA, 25 bp, synthetic construct
  misc_feature 1..25: note = Oligonucleotide
  source 1..25: mol_type = other DNA
tcccattgaattatctatgtgattt

SEQ ID NO: 35796 - DNA, 25 bp, synthetic construct
  misc_feature 1..25: note = Oligonucleotide
  source 1..25: mol_type = other DNA
tagtcccattgaattatctatgtga

SEQ ID NO: 35797 - DNA, 25 bp, synthetic construct
  misc_feature 1..25: note = Oligonucleotide
  source 1..25: mol_type = other DNA
caatagtcccattgaattatctatg

SEQ ID NO: 35798 - DNA, 25 bp, synthetic construct
  misc_feature 1..25: note = Oligonucleotide
  source 1..25: mol_type = other DNA
tcccaatagtcccattgaattatct

SEQ ID NO: 35799 - DNA, 25 bp, synthetic construct
  misc_feature 1..25: note = Oligonucleotide
  source 1..25: mol_type = other DNA
ttttcccaatagtcccattgaatta

SEQ ID NO: 35800 - DNA, 25 bp, synthetic construct
  misc_feature 1..25: note = Oligonucleotide
  source 1..25: mol_type = other DNA
ggattttcccaatagtcccattgaa

SEQ ID NO: 35801 - DNA, 25 bp, synthetic construct
  misc_feature 1..25: note = Oligonucleotide
  source 1..25: mol_type = other DNA
ctgggattttcccaatagtcccatt

SEQ ID NO: 35802 - DNA, 25 bp, synthetic construct
  misc_feature 1..25: note = Oligonucleotide
  source 1..25: mol_type = other DNA
atgctgggattttcccaatagtccc

SEQ ID NO: 35803 - DNA, 25 bp, synthetic construct
  misc_feature 1..25: note = Oligonucleotide
  source 1..25: mol_type = other DNA
tagatgctgggattttcccaatagt

SEQ ID NO: 35804 - DNA, 25 bp, synthetic construct
  misc_feature 1..25: note = Oligonucleotide
  source 1..25: mol_type = other DNA
aggtagatgctgggattttcccaat

SEQ ID NO: 35805 - DNA, 25 bp, synthetic construct
  misc_feature 1..25: note = Oligonucleotide
  source 1..25: mol_type = other DNA
attaggtagatgctgggattttccc

SEQ ID NO: 35806 - DNA, 25 bp, synthetic construct
  misc_feature 1..25: note = Oligonucleotide
  source 1..25: mol_type = other DNA
tgcattaggtagatgctgggatttt

SEQ ID NO: 35807 - DNA, 25 bp, synthetic construct
  misc_feature 1..25: note = Oligonucleotide
  source 1..25: mol_type = other DNA
ccttgcattaggtagatgctgggat

SEQ ID NO: 35808 - DNA, 25 bp, synthetic construct
  misc_feature 1..25: note = Oligonucleotide
  source 1..25: mol_type = other DNA
acgccttgcattaggtagatgctgg

SEQ ID NO: 35809 - DNA, 25 bp, synthetic construct
  misc_feature 1..25: note = Oligonucleotide
  source 1..25: mol_type = other DNA
tccacgccttgcattaggtagatgc

SEQ ID NO: 35810 - DNA, 25 bp, synthetic construct
  misc_feature 1..25: note = Oligonucleotide
  source 1..25: mol_type = other DNA
gcttccacgccttgcattaggtaga

SEQ ID NO: 35811 - DNA, 25 bp, synthetic construct
  misc_feature 1..25: note = Oligonucleotide
  source 1..25: mol_type = other DNA
tttgcttccacgccttgcattaggt

SEQ ID NO: 35812 - DNA, 25 bp, synthetic construct
  misc_feature 1..25: note = Oligonucleotide
  source 1..25: mol_type = other DNA
atttttgcttccacgccttgcatta

SEQ ID NO: 35813 - DNA, 25 bp, synthetic construct
  misc_feature 1..25: note = Oligonucleotide
  source 1..25: mol_type = other DNA
tttatttttgcttccacgccttgca

SEQ ID NO: 35814 - DNA, 25 bp, synthetic construct
  misc_feature 1..25: note = Oligonucleotide
  source 1..25: mol_type = other DNA
cattttatttttgcttccacgcctt

SEQ ID NO: 35815 - DNA, 25 bp, synthetic construct
  misc_feature 1..25: note = Oligonucleotide
  source 1..25: mol_type = other DNA
caacattttatttttgcttccacgc

SEQ ID NO: 35816 - DNA, 25 bp, synthetic construct
  misc_feature 1..25: note = Oligonucleotide
  source 1..25: mol_type = other DNA
aggcaacattttatttttgcttcca

SEQ ID NO: 35817 - DNA, 25 bp, synthetic construct
  misc_feature 1..25: note = Oligonucleotide
  source 1..25: mol_type = other DNA
tccaggcaacattttatttttgctt

SEQ ID NO: 35818 - DNA, 25 bp, synthetic construct
  misc_feature 1..25: note = Oligonucleotide
  source 1..25: mol_type = other DNA
gcctccaggcaacattttatttttg

SEQ ID NO: 35819 - DNA, 25 bp, synthetic construct
  misc_feature 1..25: note = Oligonucleotide
  source 1..25: mol_type = other DNA
attgcctccaggcaacattttattt

SEQ ID NO: 35820 - DNA, 25 bp, synthetic construct
  misc_feature 1..25: note = Oligonucleotide
  source 1..25: mol_type = other DNA
aatattgcctccaggcaacatttta

SEQ ID NO: 35821 - DNA, 25 bp, synthetic construct
  misc_feature 1..25: note = Oligonucleotide
  source 1..25: mol_type = other DNA
ccaaatattgcctccaggcaacatt

SEQ ID NO: 35822 - DNA, 25 bp, synthetic construct
  misc_feature 1..25: note = Oligonucleotide
  source 1..25: mol_type = other DNA
tctccaaatattgcctccaggcaac

SEQ ID NO: 35823 - DNA, 25 bp, synthetic construct
  misc_feature 1..25: note = Oligonucleotide
  source 1..25: mol_type = other DNA
tcatctccaaatattgcctccaggc

SEQ ID NO: 35824 - DNA, 25 bp, synthetic construct
  misc_feature 1..25: note = Oligonucleotide
  source 1..25: mol_type = other DNA
atctcatctccaaatattgcctcca

SEQ ID NO: 35825 - DNA, 25 bp, synthetic construct
  misc_feature 1..25: note = Oligonucleotide
  source 1..25: mol_type = other DNA
gccatctcatctccaaatattgcct

SEQ ID NO: 35826 - DNA, 25 bp, synthetic construct
  misc_feature 1..25: note = Oligonucleotide
  source 1..25: mol_type = other DNA
taagccatctcatctccaaatattg

SEQ ID NO: 35827 - DNA, 25 bp, synthetic construct
  misc_feature 1..25: note = Oligonucleotide
  source 1..25: mol_type = other DNA
tcttaagccatctcatctccaaata

SEQ ID NO: 35828 - DNA, 25 bp, synthetic construct
  misc_feature 1..25: note = Oligonucleotide
  source 1..25: mol_type = other DNA
aattcttaagccatctcatctccaa

SEQ ID NO: 35829 - DNA, 25 bp, synthetic construct
  misc_feature 1..25: note = Oligonucleotide
  source 1..25: mol_type = other DNA
ggaaattcttaagccatctcatctc

SEQ ID NO: 35830 - DNA, 25 bp, synthetic construct
  misc_feature 1..25: note = Oligonucleotide
  source 1..25: mol_type = other DNA
ttcggaaattcttaagccatctcat

SEQ ID NO: 35831 - DNA, 25 bp, synthetic construct
  misc_feature 1..25: note = Oligonucleotide
  source 1..25: mol_type = other DNA
actttcggaaattcttaagccatct

SEQ ID NO: 35832 - DNA, 25 bp, synthetic construct
  misc_feature 1..25: note = Oligonucleotide
  source 1..25: mol_type = other DNA
tcaactttcggaaattcttaagcca

SEQ ID NO: 35833 - DNA, 25 bp, synthetic construct
  misc_feature 1..25: note = Oligonucleotide
  source 1..25: mol_type = other DNA
tgttcaactttcggaaattcttaag

SEQ ID NO: 35834 - DNA, 25 bp, synthetic construct
  misc_feature 1..25: note = Oligonucleotide
  source 1..25: mol_type = other DNA
ctttgttcaactttcggaaattctt

SEQ ID NO: 35835 - DNA, 25 bp, synthetic construct
  misc_feature 1..25: note = Oligonucleotide
  source 1..25: mol_type = other DNA
tgtctttgttcaactttcggaaatt

SEQ ID NO: 35836 - DNA, 25 bp, synthetic construct
  misc_feature 1..25: note = Oligonucleotide
  source 1..25: mol_type = other DNA
tcatgtctttgttcaactttcggaa

SEQ ID NO: 35837 - DNA, 25 bp, synthetic construct
  misc_feature 1..25: note = Oligonucleotide
  source 1..25: mol_type = other DNA
gactcatgtctttgttcaactttcg

SEQ ID NO: 35838 - DNA, 25 bp, synthetic construct
  misc_feature 1..25: note = Oligonucleotide
  source 1..25: mol_type = other DNA
gaagactcatgtctttgttcaactt

SEQ ID NO: 35839 - DNA, 25 bp, synthetic construct
  misc_feature 1..25: note = Oligonucleotide
  source 1..25: mol_type = other DNA
actgaagactcatgtctttgttcaa

SEQ ID NO: 35840 - DNA, 25 bp, synthetic construct
  misc_feature 1..25: note = Oligonucleotide
  source 1..25: mol_type = other DNA
taaactgaagactcatgtctttgtt

SEQ ID NO: 35841 - DNA, 25 bp, synthetic construct
  misc_feature 1..25: note = Oligonucleotide
  source 1..25: mol_type = other DNA
ctttaaactgaagactcatgtcttt

SEQ ID NO: 35842 - DNA, 25 bp, synthetic construct
  misc_feature 1..25: note = Oligonucleotide
  source 1..25: mol_type = other DNA
tttctttaaactgaagactcatgtc

SEQ ID NO: 35843 - DNA, 25 bp, synthetic construct
  misc_feature 1..25: note = Oligonucleotide
  source 1..25: mol_type = other DNA
atatttctttaaactgaagactcat

SEQ ID NO: 35844 - DNA, 25 bp, synthetic construct
  misc_feature 1..25: note = Oligonucleotide
  source 1..25: mol_type = other DNA
cttatatttctttaaactgaagact

SEQ ID NO: 35845 - DNA, 25 bp, synthetic construct
  misc_feature 1..25: note = Oligonucleotide
  source 1..25: mol_type = other DNA
agacttatatttctttaaactgaag

SEQ ID NO: 35846 - DNA, 25 bp, synthetic construct
  misc_feature 1..25: note = Oligonucleotide
  source 1..25: mol_type = other DNA
ctgagacttatatttctttaaactg

SEQ ID NO: 35847 - DNA, 25 bp, synthetic construct
  misc_feature 1..25: note = Oligonucleotide
  source 1..25: mol_type = other DNA
ttgctgagacttatatttctttaaa

SEQ ID NO: 35848 - DNA, 25 bp, synthetic construct
  misc_feature 1..25: note = Oligonucleotide
  source 1..25: mol_type = other DNA
tccttgctgagacttatatttcttt

SEQ ID NO: 35849 - DNA, 25 bp, synthetic construct
  misc_feature 1..25: note = Oligonucleotide
  source 1..25: mol_type = other DNA
atttccttgctgagacttatatttc

SEQ ID NO: 35850 - DNA, 25 bp, synthetic construct
  misc_feature 1..25: note = Oligonucleotide
  source 1..25: mol_type = other DNA
tttatttccttgctgagacttatat

SEQ ID NO: 35851 - DNA, 25 bp, synthetic construct
  misc_feature 1..25: note = Oligonucleotide
  source 1..25: mol_type = other DNA
gtttttatttccttgctgagactta

SEQ ID NO: 35852 - DNA, 25 bp, synthetic construct
  misc_feature 1..25: note = Oligonucleotide
  source 1..25: mol_type = other DNA
tttgtttttatttccttgctgagac

SEQ ID NO: 35853 - DNA, 25 bp, synthetic construct
  misc_feature 1..25: note = Oligonucleotide
  source 1..25: mol_type = other DNA
agatttgtttttatttccttgctga

SEQ ID NO: 35854 - DNA, 25 bp, synthetic construct
  misc_feature 1..25: note = Oligonucleotide
  source 1..25: mol_type = other DNA
tacagatttgtttttatttccttgc

SEQ ID NO: 35855 - DNA, 25 bp, synthetic construct
  misc_feature 1..25: note = Oligonucleotide
  source 1..25: mol_type = other DNA
ggatacagatttgtttttatttcct

SEQ ID NO: 35856 - DNA, 25 bp, synthetic construct
  misc_feature 1..25: note = Oligonucleotide
  source 1..25: mol_type = other DNA
tgtggatacagatttgtttttattt

SEQ ID NO: 35857 - DNA, 25 bp, synthetic construct
  misc_feature 1..25: note = Oligonucleotide
  source 1..25: mol_type = other DNA
agatgtggatacagatttgttttta

SEQ ID NO: 35858 - DNA, 25 bp, synthetic construct
  misc_feature 1..25: note = Oligonucleotide
  source 1..25: mol_type = other DNA
gaaagatgtggatacagatttgttt

SEQ ID NO: 35859 - DNA, 25 bp, synthetic construct
  misc_feature 1..25: note = Oligonucleotide
  source 1..25: mol_type = other DNA
tatgaaagatgtggatacagatttg

SEQ ID NO: 35860 - DNA, 25 bp, synthetic construct
  misc_feature 1..25: note = Oligonucleotide
  source 1..25: mol_type = other DNA
tactatgaaagatgtggatacagat

SEQ ID NO: 35861 - DNA, 25 bp, synthetic construct
  misc_feature 1..25: note = Oligonucleotide
  source 1..25: mol_type = other DNA
ttttactatgaaagatgtggataca

SEQ ID NO: 35862 - DNA, 25 bp, synthetic construct
  misc_feature 1..25: note = Oligonucleotide
  source 1..25: mol_type = other DNA
cagttttactatgaaagatgtggat

SEQ ID NO: 35863 - DNA, 25 bp, synthetic construct
  misc_feature 1..25: note = Oligonucleotide
  source 1..25: mol_type = other DNA
ctacagttttactatgaaagatgtg

SEQ ID NO: 35864 - DNA, 25 bp, synthetic construct
  misc_feature 1..25: note = Oligonucleotide
  source 1..25: mol_type = other DNA
attctacagttttactatgaaagat

SEQ ID NO: 35865 - DNA, 25 bp, synthetic construct
  misc_feature 1..25: note = Oligonucleotide
  source 1..25: mol_type = other DNA
agcattctacagttttactatgaaa

SEQ ID NO: 35866 - DNA, 25 bp, synthetic construct
  misc_feature 1..25: note = Oligonucleotide
  source 1..25: mol_type = other DNA
cacagcattctacagttttactatg

SEQ ID NO: 35867 - DNA, 25 bp, synthetic construct
  misc_feature 1..25: note = Oligonucleotide
  source 1..25: mol_type = other DNA
gctcacagcattctacagttttact

SEQ ID NO: 35868 - DNA, 25 bp, synthetic construct
  misc_feature 1..25: note = Oligonucleotide
  source 1..25: mol_type = other DNA
cttgctcacagcattctacagtttt

SEQ ID NO: 35869 - DNA, 25 bp, synthetic construct
  misc_feature 1..25: note = Oligonucleotide
  source 1..25: mol_type = other DNA
ctgcttgctcacagcattctacagt

SEQ ID NO: 35870 - DNA, 25 bp, synthetic construct
  misc_feature 1..25: note = Oligonucleotide
  source 1..25: mol_type = other DNA
tttctgcttgctcacagcattctac

SEQ ID NO: 35871 - DNA, 25 bp, synthetic construct
  misc_feature 1..25: note = Oligonucleotide
  source 1..25: mol_type = other DNA
agatttctgcttgctcacagcattc

SEQ ID NO: 35872 - DNA, 25 bp, synthetic construct
  misc_feature 1..25: note = Oligonucleotide
  source 1..25: mol_type = other DNA
taaagatttctgcttgctcacagca

SEQ ID NO: 35873 - DNA, 25 bp, synthetic construct
  misc_feature 1..25: note = Oligonucleotide
  source 1..25: mol_type = other DNA
ttttaaagatttctgcttgctcaca

SEQ ID NO: 35874 - DNA, 25 bp, synthetic construct
  misc_feature 1..25: note = Oligonucleotide
  source 1..25: mol_type = other DNA
ttgttttaaagatttctgcttgctc

SEQ ID NO: 35875 - DNA, 25 bp, synthetic construct
  misc_feature 1..25: note = Oligonucleotide
  source 1..25: mol_type = other DNA
tcattgttttaaagatttctgcttg

SEQ ID NO: 35876 - DNA, 25 bp, synthetic construct
  misc_feature 1..25: note = Oligonucleotide
  source 1..25: mol_type = other DNA
ctctcattgttttaaagatttctgc

SEQ ID NO: 35877 - DNA, 25 bp, synthetic construct
  misc_feature 1..25: note = Oligonucleotide
  source 1..25: mol_type = other DNA
cctctctcattgttttaaagatttc

SEQ ID NO: 35878 - DNA, 25 bp, synthetic construct
  misc_feature 1..25: note = Oligonucleotide
  source 1..25: mol_type = other DNA
cagcctctctcattgttttaaagat

SEQ ID NO: 35879 - DNA, 25 bp, synthetic construct
  misc_feature 1..25: note = Oligonucleotide
  source 1..25: mol_type = other DNA
acccagcctctctcattgttttaaa

SEQ ID NO: 35880 - DNA, 25 bp, synthetic construct
  misc_feature 1..25: note = Oligonucleotide
  source 1..25: mol_type = other DNA
cgcacccagcctctctcattgtttt

SEQ ID NO: 35881 - DNA, 25 bp, synthetic construct
  misc_feature 1..25: note = Oligonucleotide
  source 1..25: mol_type = other DNA
caccgcacccagcctctctcattgt

SEQ ID NO: 35882 - DNA, 25 bp, synthetic construct
  misc_feature 1..25: note = Oligonucleotide
  source 1..25: mol_type = other DNA
agccaccgcacccagcctctctcat

SEQ ID NO: 35883 - DNA, 25 bp, synthetic construct
  misc_feature 1..25: note = Oligonucleotide
  source 1..25: mol_type = other DNA
atgagccaccgcacccagcctctct

SEQ ID NO: 35884 - DNA, 25 bp, synthetic construct
  misc_feature 1..25: note = Oligonucleotide
  source 1..25: mol_type = other DNA
ggcatgagccaccgcacccagcctc

SEQ ID NO: 35885 - DNA, 25 bp, synthetic construct
  misc_feature 1..25: note = Oligonucleotide
  source 1..25: mol_type = other DNA
acaggcatgagccaccgcacccagc

SEQ ID NO: 35886 - DNA, 25 bp, synthetic construct
  misc_feature 1..25: note = Oligonucleotide
  source 1..25: mol_type = other DNA
agtacaggcatgagccaccgcaccc

SEQ ID NO: 35887 - DNA, 25 bp, synthetic construct
  misc_feature 1..25: note = Oligonucleotide
  source 1..25: mol_type = other DNA
gagagtacaggcatgagccaccgca

SEQ ID NO: 35888 - DNA, 25 bp, synthetic construct
  misc_feature 1..25: note = Oligonucleotide
  source 1..25: mol_type = other DNA
gctgagagtacaggcatgagccacc

SEQ ID NO: 35889 - DNA, 25 bp, synthetic construct
  misc_feature 1..25: note = Oligonucleotide
  source 1..25: mol_type = other DNA
agtgctgagagtacaggcatgagcc

SEQ ID NO: 35890 - DNA, 25 bp, synthetic construct
  misc_feature 1..25: note = Oligonucleotide
  source 1..25: mol_type = other DNA
cagagtgctgagagtacaggcatga

SEQ ID NO: 35891 - DNA, 25 bp, synthetic construct
  misc_feature 1..25: note = Oligonucleotide
  source 1..25: mol_type = other DNA
tcccagagtgctgagagtacaggca

SEQ ID NO: 35892 - DNA, 25 bp, synthetic construct
  misc_feature 1..25: note = Oligonucleotide
  source 1..25: mol_type = other DNA
gcctcccagagtgctgagagtacag

SEQ ID NO: 35893 - DNA, 25 bp, synthetic construct
  misc_feature 1..25: note = Oligonucleotide
  source 1..25: mol_type = other DNA
ttggcctcccagagtgctgagagta

SEQ ID NO: 35894 - DNA, 25 bp, synthetic construct
  misc_feature 1..25: note = Oligonucleotide
  source 1..25: mol_type = other DNA
gtcttggcctcccagagtgctgaga

SEQ ID NO: 35895 - DNA, 25 bp, synthetic construct
  misc_feature 1..25: note = Oligonucleotide
  source 1..25: mol_type = other DNA
cctgtcttggcctcccagagtgctg

SEQ ID NO: 35896 - DNA, 25 bp, synthetic construct
  misc_feature 1..25: note = Oligonucleotide
  source 1..25: mol_type = other DNA
ccacctgtcttggcctcccagagtg

SEQ ID NO: 35897 - DNA, 25 bp, synthetic construct
  misc_feature 1..25: note = Oligonucleotide
  source 1..25: mol_type = other DNA
gatccacctgtcttggcctcccaga

SEQ ID NO: 35898 - DNA, 25 bp, synthetic construct
  misc_feature 1..25: note = Oligonucleotide
  source 1..25: mol_type = other DNA
agtgatccacctgtcttggcctccc

SEQ ID NO: 35899 - DNA, 25 bp, synthetic construct
  misc_feature 1..25: note = Oligonucleotide
  source 1..25: mol_type = other DNA
tcaagtgatccacctgtcttggcct

SEQ ID NO: 35900 - DNA, 25 bp, synthetic construct
  misc_feature 1..25: note = Oligonucleotide
  source 1..25: mol_type = other DNA
gactcaagtgatccacctgtcttgg

SEQ ID NO: 35901 - DNA, 25 bp, synthetic construct
  misc_feature 1..25: note = Oligonucleotide
  source 1..25: mol_type = other DNA
ctagactcaagtgatccacctgtct

SEQ ID NO: 35902 - DNA, 25 bp, synthetic construct
  misc_feature 1..25: note = Oligonucleotide
  source 1..25: mol_type = other DNA
ctcctagactcaagtgatccacctg

SEQ ID NO: 35903 - DNA, 25 bp, synthetic construct
  misc_feature 1..25: note = Oligonucleotide
  source 1..25: mol_type = other DNA
aaactcctagactcaagtgatccac

SEQ ID NO: 35904 - DNA, 25 bp, synthetic construct
  misc_feature 1..25: note = Oligonucleotide
  source 1..25: mol_type = other DNA
ctcaaactcctagactcaagtgatc

SEQ ID NO: 35905 - DNA, 25 bp, synthetic construct
  misc_feature 1..25: note = Oligonucleotide
  source 1..25: mol_type = other DNA
ggtctcaaactcctagactcaagtg

SEQ ID NO: 35906 - DNA, 25 bp, synthetic construct
  misc_feature 1..25: note = Oligonucleotide
  source 1..25: mol_type = other DNA
gctggtctcaaactcctagactcaa

SEQ ID NO: 35907 - DNA, 25 bp, synthetic construct
  misc_feature 1..25: note = Oligonucleotide
  source 1..25: mol_type = other DNA
caggctggtctcaaactcctagact

SEQ ID NO: 35908 - DNA, 25 bp, synthetic construct
  misc_feature 1..25: note = Oligonucleotide
  source 1..25: mol_type = other DNA
ccccaggctggtctcaaactcctag

SEQ ID NO: 35909 - DNA, 25 bp, synthetic construct
  misc_feature 1..25: note = Oligonucleotide
  source 1..25: mol_type = other DNA
gttccccaggctggtctcaaactcc

SEQ ID NO: 35910 - DNA, 25 bp, synthetic construct
  misc_feature 1..25: note = Oligonucleotide
  source 1..25: mol_type = other DNA
catgttccccaggctggtctcaaac

SEQ ID NO: 35911 - DNA, 25 bp, synthetic construct
  misc_feature 1..25: note = Oligonucleotide
  source 1..25: mol_type = other DNA
cgccatgttccccaggctggtctca

SEQ ID NO: 35912 - DNA, 25 bp, synthetic construct
  misc_feature 1..25: note = Oligonucleotide
  source 1..25: mol_type = other DNA
tttcgccatgttccccaggctggtc

SEQ ID NO: 35913 - DNA, 25 bp, synthetic construct
  misc_feature 1..25: note = Oligonucleotide
  source 1..25: mol_type = other DNA
gggtttcgccatgttccccaggctg

SEQ ID NO: 35914 - DNA, 25 bp, synthetic construct
  misc_feature 1..25: note = Oligonucleotide
  source 1..25: mol_type = other DNA
atagggtttcgccatgttccccagg

SEQ ID NO: 35915 - DNA, 25 bp, synthetic construct
  misc_feature 1..25: note = Oligonucleotide
  source 1..25: mol_type = other DNA
gagatagggtttcgccatgttcccc

SEQ ID NO: 35916 - DNA, 25 bp, synthetic construct
  misc_feature 1..25: note = Oligonucleotide
  source 1..25: mol_type = other DNA
gtagagatagggtttcgccatgttc

SEQ ID NO: 35917 - DNA, 25 bp, synthetic construct
  misc_feature 1..25: note = Oligonucleotide
  source 1..25: mol_type = other DNA
ttagtagagatagggtttcgccatg

SEQ ID NO: 35918 - DNA, 25 bp, synthetic construct
  misc_feature 1..25: note = Oligonucleotide
  source 1..25: mol_type = other DNA
tttttagtagagatagggtttcgcc

SEQ ID NO: 35919 - DNA, 25 bp, synthetic construct
  misc_feature 1..25: note = Oligonucleotide
  source 1..25: mol_type = other DNA
gtatttttagtagagatagggtttc

SEQ ID NO: 35920 - DNA, 25 bp, synthetic construct
  misc_feature 1..25: note = Oligonucleotide
  source 1..25: mol_type = other DNA
tttgtatttttagtagagatagggt

SEQ ID NO: 35921 - DNA, 25 bp, synthetic construct
  misc_feature 1..25: note = Oligonucleotide
  source 1..25: mol_type = other DNA
atttttgtatttttagtagagatag

SEQ ID NO: 35922 - DNA, 25 bp, synthetic construct
  misc_feature 1..25: note = Oligonucleotide
  source 1..25: mol_type = other DNA
ataatttttgtatttttagtagaga

SEQ ID NO: 35923 - DNA, 25 bp, synthetic construct
  misc_feature 1..25: note = Oligonucleotide
  source 1..25: mol_type = other DNA
aggataatttttgtatttttagtag

SEQ ID NO: 35924 - DNA, 25 bp, synthetic construct
  misc_feature 1..25: note = Oligonucleotide
  source 1..25: mol_type = other DNA
gccaggataatttttgtatttttag

SEQ ID NO: 35925 - DNA, 25 bp, synthetic construct
  misc_feature 1..25: note = Oligonucleotide
  source 1..25: mol_type = other DNA
catgccaggataatttttgtatttt

SEQ ID NO: 35926 - DNA, 25 bp, synthetic construct
  misc_feature 1..25: note = Oligonucleotide
  source 1..25: mol_type = other DNA
caccatgccaggataatttttgtat

SEQ ID NO: 35927 - DNA, 25 bp, synthetic construct
  misc_feature 1..25: note = Oligonucleotide
  source 1..25: mol_type = other DNA
caccaccatgccaggataatttttg

SEQ ID NO: 35928 - DNA, 25 bp, synthetic construct
  misc_feature 1..25: note = Oligonucleotide
  source 1..25: mol_type = other DNA
acacaccaccatgccaggataattt

SEQ ID NO: 35929 - DNA, 25 bp, synthetic construct
  misc_feature 1..25: note = Oligonucleotide
  source 1..25: mol_type = other DNA
ggcacacaccaccatgccaggataa

SEQ ID NO: 35930 - DNA, 25 bp, synthetic construct
  misc_feature 1..25: note = Oligonucleotide
  source 1..25: mol_type = other DNA
acaggcacacaccaccatgccagga

SEQ ID NO: 35931 - DNA, 25 bp, synthetic construct
  misc_feature 1..25: note = Oligonucleotide
  source 1..25: mol_type = other DNA
accacaggcacacaccaccatgcca

SEQ ID NO: 35932 - DNA, 25 bp, synthetic construct
  misc_feature 1..25: note = Oligonucleotide
  source 1..25: mol_type = other DNA
gggaccacaggcacacaccaccatg

SEQ ID NO: 35933 - DNA, 25 bp, synthetic construct
  misc_feature 1..25: note = Oligonucleotide
  source 1..25: mol_type = other DNA
gctgggaccacaggcacacaccacc

SEQ ID NO: 35934 - DNA, 25 bp, synthetic construct
  misc_feature 1..25: note = Oligonucleotide
  source 1..25: mol_type = other DNA
gtagctgggaccacaggcacacacc

SEQ ID NO: 35935 - DNA, 25 bp, synthetic construct
  misc_feature 1..25: note = Oligonucleotide
  source 1..25: mol_type = other DNA
tgagtagctgggaccacaggcacac

SEQ ID NO: 35936 - DNA, 25 bp, synthetic construct
  misc_feature 1..25: note = Oligonucleotide
  source 1..25: mol_type = other DNA
tcctgagtagctgggaccacaggca

SEQ ID NO: 35937 - DNA, 25 bp, synthetic construct
  misc_feature 1..25: note = Oligonucleotide
  source 1..25: mol_type = other DNA
gcctcctgagtagctgggaccacag

SEQ ID NO: 35938 - DNA, 25 bp, synthetic construct
  misc_feature 1..25: note = Oligonucleotide
  source 1..25: mol_type = other DNA
tcagcctcctgagtagctgggacca

SEQ ID NO: 35939 - DNA, 25 bp, synthetic construct
  misc_feature 1..25: note = Oligonucleotide
  source 1..25: mol_type = other DNA
acctcagcctcctgagtagctggga

SEQ ID NO: 35940 - DNA, 25 bp, synthetic construct
  misc_feature 1..25: note = Oligonucleotide
  source 1..25: mol_type = other DNA
cccacctcagcctcctgagtagctg

SEQ ID NO: 35941 - DNA, 25 bp, synthetic construct
  misc_feature 1..25: note = Oligonucleotide
  source 1..25: mol_type = other DNA
cctcccacctcagcctcctgagtag

SEQ ID NO: 35942 - DNA, 25 bp, synthetic construct
  misc_feature 1..25: note = Oligonucleotide
  source 1..25: mol_type = other DNA
aatcctcccacctcagcctcctgag

SEQ ID NO: 35943 - DNA, 25 bp, synthetic construct
  misc_feature 1..25: note = Oligonucleotide
  source 1..25: mol_type = other DNA
agcaatcctcccacctcagcctcct

SEQ ID NO: 35944 - DNA, 25 bp, synthetic construct
  misc_feature 1..25: note = Oligonucleotide
  source 1..25: mol_type = other DNA
ttaagcaatcctcccacctcagcct

SEQ ID NO: 35945 - DNA, 25 bp, synthetic construct
  misc_feature 1..25: note = Oligonucleotide
  source 1..25: mol_type = other DNA
ggcttaagcaatcctcccacctcag

SEQ ID NO: 35946 - DNA, 25 bp, synthetic construct
  misc_feature 1..25: note = Oligonucleotide
  source 1..25: mol_type = other DNA
ccaggcttaagcaatcctcccacct

SEQ ID NO: 35947 - DNA, 25 bp, synthetic construct
  misc_feature 1..25: note = Oligonucleotide
  source 1..25: mol_type = other DNA
gtcccaggcttaagcaatcctccca

SEQ ID NO: 35948 - DNA, 25 bp, synthetic construct
  misc_feature 1..25: note = Oligonucleotide
  source 1..25: mol_type = other DNA
cacgtcccaggcttaagcaatcctc

SEQ ID NO: 35949 - DNA, 25 bp, synthetic construct
  misc_feature 1..25: note = Oligonucleotide
  source 1..25: mol_type = other DNA
ctccacgtcccaggcttaagcaatc

SEQ ID NO: 35950 - DNA, 25 bp, synthetic construct
  misc_feature 1..25: note = Oligonucleotide
  source 1..25: mol_type = other DNA
aacctccacgtcccaggcttaagca

SEQ ID NO: 35951 - DNA, 25 bp, synthetic construct
  misc_feature 1..25: note = Oligonucleotide
  source 1..25: mol_type = other DNA
tgcaacctccacgtcccaggcttaa

SEQ ID NO: 35952 - DNA, 25 bp, synthetic construct
  misc_feature 1..25: note = Oligonucleotide
  source 1..25: mol_type = other DNA
cactgcaacctccacgtcccaggct

SEQ ID NO: 35953 - DNA, 25 bp, synthetic construct
  misc_feature 1..25: note = Oligonucleotide
  source 1..25: mol_type = other DNA
gctcactgcaacctccacgtcccag

SEQ ID NO: 35954 - DNA, 25 bp, synthetic construct
  misc_feature 1..25: note = Oligonucleotide
  source 1..25: mol_type = other DNA
ttggctcactgcaacctccacgtcc

SEQ ID NO: 35955 - DNA, 25 bp, synthetic construct
  misc_feature 1..25: note = Oligonucleotide
  source 1..25: mol_type = other DNA
atcttggctcactgcaacctccacg

SEQ ID NO: 35956 - DNA, 25 bp, synthetic construct
  misc_feature 1..25: note = Oligonucleotide
  source 1..25: mol_type = other DNA
atgatcttggctcactgcaacctcc

SEQ ID NO: 35957 - DNA, 25 bp, synthetic construct
  misc_feature 1..25: note = Oligonucleotide
  source 1..25: mol_type = other DNA
ggcatgatcttggctcactgcaacc

SEQ ID NO: 35958 - DNA, 25 bp, synthetic construct
  misc_feature 1..25: note = Oligonucleotide
  source 1..25: mol_type = other DNA
actggcatgatcttggctcactgca

SEQ ID NO: 35959 - DNA, 25 bp, synthetic construct
  misc_feature 1..25: note = Oligonucleotide
  source 1..25: mol_type = other DNA
tgcactggcatgatcttggctcact

SEQ ID NO: 35960 - DNA, 25 bp, synthetic construct
  misc_feature 1..25: note = Oligonucleotide
  source 1..25: mol_type = other DNA
gagtgcactggcatgatcttggctc

SEQ ID NO: 35961 - DNA, 25 bp, synthetic construct
  misc_feature 1..25: note = Oligonucleotide
  source 1..25: mol_type = other DNA
ctggagtgcactggcatgatcttgg

SEQ ID NO: 35962 - DNA, 25 bp, synthetic construct
  misc_feature 1..25: note = Oligonucleotide
  source 1..25: mol_type = other DNA
aggctggagtgcactggcatgatct

SEQ ID NO: 35963 - DNA, 25 bp, synthetic construct
  misc_feature 1..25: note = Oligonucleotide
  source 1..25: mol_type = other DNA
cccaggctggagtgcactggcatga

SEQ ID NO: 35964 - DNA, 25 bp, synthetic construct
  misc_feature 1..25: note = Oligonucleotide
  source 1..25: mol_type = other DNA
ttgcccaggctggagtgcactggca

SEQ ID NO: 35965 - DNA, 25 bp, synthetic construct
  misc_feature 1..25: note = Oligonucleotide
  source 1..25: mol_type = other DNA
ctgttgcccaggctggagtgcactg

SEQ ID NO: 35966 - DNA, 25 bp, synthetic construct
  misc_feature 1..25: note = Oligonucleotide
  source 1..25: mol_type = other DNA
gctctgttgcccaggctggagtgca

SEQ ID NO: 35967 - DNA, 25 bp, synthetic construct
  misc_feature 1..25: note = Oligonucleotide
  source 1..25: mol_type = other DNA
ctcgctctgttgcccaggctggagt

SEQ ID NO: 35968 - DNA, 25 bp, synthetic construct
  misc_feature 1..25: note = Oligonucleotide
  source 1..25: mol_type = other DNA
ggtctcgctctgttgcccaggctgg

SEQ ID NO: 35969 - DNA, 25 bp, synthetic construct
  misc_feature 1..25: note = Oligonucleotide
  source 1..25: mol_type = other DNA
cagggtctcgctctgttgcccaggc

SEQ ID NO: 35970 - DNA, 25 bp, synthetic construct
  misc_feature 1..25: note = Oligonucleotide
  source 1..25: mol_type = other DNA
agacagggtctcgctctgttgccca

SEQ ID NO: 35971 - DNA, 25 bp, synthetic construct
  misc_feature 1..25: note = Oligonucleotide
  source 1..25: mol_type = other DNA
ttgagacagggtctcgctctgttgc

SEQ ID NO: 35972 - DNA, 25 bp, synthetic construct
  misc_feature 1..25: note = Oligonucleotide
  source 1..25: mol_type = other DNA
gttttgagacagggtctcgctctgt

SEQ ID NO: 35973 - DNA, 25 bp, synthetic construct
  misc_feature 1..25: note = Oligonucleotide
  source 1..25: mol_type = other DNA
tttgttttgagacagggtctcgctc

SEQ ID NO: 35974 - DNA, 25 bp, synthetic construct
  misc_feature 1..25: note = Oligonucleotide
  source 1..25: mol_type = other DNA
tgttttgttttgagacagggtctcg

SEQ ID NO: 35975 - DNA, 25 bp, synthetic construct
  misc_feature 1..25: note = Oligonucleotide
  source 1..25: mol_type = other DNA
ctttgttttgttttgagacagggtc

SEQ ID NO: 35976 - DNA, 25 bp, synthetic construct
  misc_feature 1..25: note = Oligonucleotide
  source 1..25: mol_type = other DNA
ttgctttgttttgttttgagacagg

SEQ ID NO: 35977 - DNA, 25 bp, synthetic construct
  misc_feature 1..25: note = Oligonucleotide
  source 1..25: mol_type = other DNA
tttttgctttgttttgttttgagac

SEQ ID NO: 35978 - DNA, 25 bp, synthetic construct
  misc_feature 1..25: note = Oligonucleotide
  source 1..25: mol_type = other DNA
cattttttgctttgttttgttttga

SEQ ID NO: 35979 - DNA, 25 bp, synthetic construct
  misc_feature 1..25: note = Oligonucleotide
  source 1..25: mol_type = other DNA
catcattttttgctttgttttgttt

SEQ ID NO: 35980 - DNA, 25 bp, synthetic construct
  misc_feature 1..25: note = Oligonucleotide
  source 1..25: mol_type = other DNA
tctcatcattttttgctttgttttg

SEQ ID NO: 35981 - DNA, 25 bp, synthetic construct
  misc_feature 1..25: note = Oligonucleotide
  source 1..25: mol_type = other DNA
ctctctcatcattttttgctttgtt

SEQ ID NO: 35982 - DNA, 25 bp, synthetic construct
  misc_feature 1..25: note = Oligonucleotide
  source 1..25: mol_type = other DNA
tctctctctcatcattttttgcttt

SEQ ID NO: 35983 - DNA, 25 bp, synthetic construct
  misc_feature 1..25: note = Oligonucleotide
  source 1..25: mol_type = other DNA
ctctctctctctcatcattttttgc

SEQ ID NO: 35984 - DNA, 25 bp, synthetic construct
  misc_feature 1..25: note = Oligonucleotide
  source 1..25: mol_type = other DNA
tctctctctctctctcatcattttt

SEQ ID NO: 35985 - DNA, 25 bp, synthetic construct
  misc_feature 1..25: note = Oligonucleotide
  source 1..25: mol_type = other DNA
ccatctctctctctctctcatcatt

SEQ ID NO: 35986 - DNA, 25 bp, synthetic construct
  misc_feature 1..25: note = Oligonucleotide
  source 1..25: mol_type = other DNA
agcccatctctctctctctctcatc

SEQ ID NO: 35987 - DNA, 25 bp, synthetic construct
  misc_feature 1..25: note = Oligonucleotide
  source 1..25: mol_type = other DNA
agcagcccatctctctctctctctc

SEQ ID NO: 35988 - DNA, 25 bp, synthetic construct
  misc_feature 1..25: note = Oligonucleotide
  source 1..25: mol_type = other DNA
tccagcagcccatctctctctctct

SEQ ID NO: 35989 - DNA, 25 bp, synthetic construct
  misc_feature 1..25: note = Oligonucleotide
  source 1..25: mol_type = other DNA
acatccagcagcccatctctctctc

SEQ ID NO: 35990 - DNA, 25 bp, synthetic construct
  misc_feature 1..25: note = Oligonucleotide
  source 1..25: mol_type = other DNA
aagacatccagcagcccatctctct

SEQ ID NO: 35991 - DNA, 25 bp, synthetic construct
  misc_feature 1..25: note = Oligonucleotide
  source 1..25: mol_type = other DNA
tctaagacatccagcagcccatctc

SEQ ID NO: 35992 - DNA, 25 bp, synthetic construct
  misc_feature 1..25: note = Oligonucleotide
  source 1..25: mol_type = other DNA
ccgtctaagacatccagcagcccat

SEQ ID NO: 35993 - DNA, 25 bp, synthetic construct
  misc_feature 1..25: note = Oligonucleotide
  source 1..25: mol_type = other DNA
ctcccgtctaagacatccagcagcc

SEQ ID NO: 35994 - DNA, 25 bp, synthetic construct
  misc_feature 1..25: note = Oligonucleotide
  source 1..25: mol_type = other DNA
ctgctcccgtctaagacatccagca

SEQ ID NO: 35995 - DNA, 25 bp, synthetic construct
  misc_feature 1..25: note = Oligonucleotide
  source 1..25: mol_type = other DNA
ccactgctcccgtctaagacatcca

SEQ ID NO: 35996 - DNA, 25 bp, synthetic construct
  misc_feature 1..25: note = Oligonucleotide
  source 1..25: mol_type = other DNA
ggaccactgctcccgtctaagacat

SEQ ID NO: 35997 - DNA, 25 bp, synthetic construct
  misc_feature 1..25: note = Oligonucleotide
  source 1..25: mol_type = other DNA
gttggaccactgctcccgtctaaga

SEQ ID NO: 35998 - DNA, 25 bp, synthetic construct
  misc_feature 1..25: note = Oligonucleotide
  source 1..25: mol_type = other DNA
tcagttggaccactgctcccgtcta

SEQ ID NO: 35999 - DNA, 25 bp, synthetic construct
  misc_feature 1..25: note = Oligonucleotide
  source 1..25: mol_type = other DNA
ttgtcagttggaccactgctcccgt

SEQ ID NO: 36000 - DNA, 25 bp, synthetic construct
  misc_feature 1..25: note = Oligonucleotide
  source 1..25: mol_type = other DNA
ctgttgtcagttggaccactgctcc

SEQ ID NO: 36001 - DNA, 25 bp, synthetic construct
  misc_feature 1..25: note = Oligonucleotide
  source 1..25: mol_type = other DNA
agtctgttgtcagttggaccactgc

SEQ ID NO: 36002 - DNA, 25 bp, synthetic construct
  misc_feature 1..25: note = Oligonucleotide
  source 1..25: mol_type = other DNA
agaagtctgttgtcagttggaccac

SEQ ID NO: 36003 - DNA, 25 bp, synthetic construct
  misc_feature 1..25: note = Oligonucleotide
  source 1..25: mol_type = other DNA
atgagaagtctgttgtcagttggac

SEQ ID NO: 36004 - DNA, 25 bp, synthetic construct
  misc_feature 1..25: note = Oligonucleotide
  source 1..25: mol_type = other DNA
ctgatgagaagtctgttgtcagttg

SEQ ID NO: 36005 - DNA, 25 bp, synthetic construct
  misc_feature 1..25: note = Oligonucleotide
  source 1..25: mol_type = other DNA
ctgctgatgagaagtctgttgtcag

SEQ ID NO: 36006 - DNA, 25 bp, synthetic construct
  misc_feature 1..25: note = Oligonucleotide
  source 1..25: mol_type = other DNA
ccactgctgatgagaagtctgttgt

SEQ ID NO: 36007 - DNA, 25 bp, synthetic construct
  misc_feature 1..25: note = Oligonucleotide
  source 1..25: mol_type = other DNA
ctgccactgctgatgagaagtctgt

SEQ ID NO: 36008 - DNA, 25 bp, synthetic construct
  misc_feature 1..25: note = Oligonucleotide
  source 1..25: mol_type = other DNA
catctgccactgctgatgagaagtc

SEQ ID NO: 36009 - DNA, 25 bp, synthetic construct
  misc_feature 1..25: note = Oligonucleotide
  source 1..25: mol_type = other DNA
tgtcatctgccactgctgatgagaa

SEQ ID NO: 36010 - DNA, 25 bp, synthetic construct
  misc_feature 1..25: note = Oligonucleotide
  source 1..25: mol_type = other DNA
tactgtcatctgccactgctgatga

SEQ ID NO: 36011 - DNA, 25 bp, synthetic construct
  misc_feature 1..25: note = Oligonucleotide
  source 1..25: mol_type = other DNA
atctactgtcatctgccactgctga

SEQ ID NO: 36012 - DNA, 25 bp, synthetic construct
  misc_feature 1..25: note = Oligonucleotide
  source 1..25: mol_type = other DNA
atcatctactgtcatctgccactgc

SEQ ID NO: 36013 - DNA, 25 bp, synthetic construct
  misc_feature 1..25: note = Oligonucleotide
  source 1..25: mol_type = other DNA
tccatcatctactgtcatctgccac

SEQ ID NO: 36014 - DNA, 25 bp, synthetic construct
  misc_feature 1..25: note = Oligonucleotide
  source 1..25: mol_type = other DNA
tcttccatcatctactgtcatctgc

SEQ ID NO: 36015 - DNA, 25 bp, synthetic construct
  misc_feature 1..25: note = Oligonucleotide
  source 1..25: mol_type = other DNA
tcttcttccatcatctactgtcatc

SEQ ID NO: 36016 - DNA, 25 bp, synthetic construct
  misc_feature 1..25: note = Oligonucleotide
  source 1..25: mol_type = other DNA
agctcttcttccatcatctactgtc

SEQ ID NO: 36017 - DNA, 25 bp, synthetic construct
  misc_feature 1..25: note = Oligonucleotide
  source 1..25: mol_type = other DNA
tgaagctcttcttccatcatctact

SEQ ID NO: 36018 - DNA, 25 bp, synthetic construct
  misc_feature 1..25: note = Oligonucleotide
  source 1..25: mol_type = other DNA
ctttgaagctcttcttccatcatct

SEQ ID NO: 36019 - DNA, 25 bp, synthetic construct
  misc_feature 1..25: note = Oligonucleotide
  source 1..25: mol_type = other DNA
acactttgaagctcttcttccatca

SEQ ID NO: 36020 - DNA, 25 bp, synthetic construct
  misc_feature 1..25: note = Oligonucleotide
  source 1..25: mol_type = other DNA
tccacactttgaagctcttcttcca

SEQ ID NO: 36021 - DNA, 25 bp, synthetic construct
  misc_feature 1..25: note = Oligonucleotide
  source 1..25: mol_type = other DNA
gactccacactttgaagctcttctt

SEQ ID NO: 36022 - DNA, 25 bp, synthetic construct
  misc_feature 1..25: note = Oligonucleotide
  source 1..25: mol_type = other DNA
tttgactccacactttgaagctctt

SEQ ID NO: 36023 - DNA, 25 bp, synthetic construct
  misc_feature 1..25: note = Oligonucleotide
  source 1..25: mol_type = other DNA
aattttgactccacactttgaagct

SEQ ID NO: 36024 - DNA, 25 bp, synthetic construct
  misc_feature 1..25: note = Oligonucleotide
  source 1..25: mol_type = other DNA
aagaattttgactccacactttgaa

SEQ ID NO: 36025 - DNA, 25 bp, synthetic construct
  misc_feature 1..25: note = Oligonucleotide
  source 1..25: mol_type = other DNA
gaaaagaattttgactccacacttt

SEQ ID NO: 36026 - DNA, 25 bp, synthetic construct
  misc_feature 1..25: note = Oligonucleotide
  source 1..25: mol_type = other DNA
gtggaaaagaattttgactccacac

SEQ ID NO: 36027 - DNA, 25 bp, synthetic construct
  misc_feature 1..25: note = Oligonucleotide
  source 1..25: mol_type = other DNA
taggtggaaaagaattttgactcca

SEQ ID NO: 36028 - DNA, 25 bp, synthetic construct
  misc_feature 1..25: note = Oligonucleotide
  source 1..25: mol_type = other DNA
ttctaggtggaaaagaattttgact

SEQ ID NO: 36029 - DNA, 25 bp, synthetic construct
  misc_feature 1..25: note = Oligonucleotide
  source 1..25: mol_type = other DNA
gaattctaggtggaaaagaattttg

SEQ ID NO: 36030 - DNA, 25 bp, synthetic construct
  misc_feature 1..25: note = Oligonucleotide
  source 1..25: mol_type = other DNA
atagaattctaggtggaaaagaatt

SEQ ID NO: 36031 - DNA, 25 bp, synthetic construct
  misc_feature 1..25: note = Oligonucleotide
  source 1..25: mol_type = other DNA
ggtatagaattctaggtggaaaaga

SEQ ID NO: 36032 - DNA, 25 bp, synthetic construct
  misc_feature 1..25: note = Oligonucleotide
  source 1..25: mol_type = other DNA
cggggtatagaattctaggtggaaa

SEQ ID NO: 36033 - DNA, 25 bp, synthetic construct
  misc_feature 1..25: note = Oligonucleotide
  source 1..25: mol_type = other DNA
tagcggggtatagaattctaggtgg

SEQ ID NO: 36034 - DNA, 25 bp, synthetic construct
  misc_feature 1..25: note = Oligonucleotide
  source 1..25: mol_type = other DNA
gattagcggggtatagaattctagg

SEQ ID NO: 36035 - DNA, 25 bp, synthetic construct
  misc_feature 1..25: note = Oligonucleotide
  source 1..25: mol_type = other DNA
caggattagcggggtatagaattct

SEQ ID NO: 36036 - DNA, 25 bp, synthetic construct
  misc_feature 1..25: note = Oligonucleotide
  source 1..25: mol_type = other DNA
gagcaggattagcggggtatagaat

SEQ ID NO: 36037 - DNA, 25 bp, synthetic construct
  misc_feature 1..25: note = Oligonucleotide
  source 1..25: mol_type = other DNA
aatgagcaggattagcggggtatag

SEQ ID NO: 36038 - DNA, 25 bp, synthetic construct
  misc_feature 1..25: note = Oligonucleotide
  source 1..25: mol_type = other DNA
ctgaatgagcaggattagcggggta

SEQ ID NO: 36039 - DNA, 25 bp, synthetic construct
  misc_feature 1..25: note = Oligonucleotide
  source 1..25: mol_type = other DNA
ctcctgaatgagcaggattagcggg

SEQ ID NO: 36040 - DNA, 25 bp, synthetic construct
  misc_feature 1..25: note = Oligonucleotide
  source 1..25: mol_type = other DNA
tcactcctgaatgagcaggattagc

SEQ ID NO: 36041 - DNA, 25 bp, synthetic construct
  misc_feature 1..25: note = Oligonucleotide
  source 1..25: mol_type = other DNA
gcctcactcctgaatgagcaggatt

SEQ ID NO: 36042 - DNA, 25 bp, synthetic construct
  misc_feature 1..25: note = Oligonucleotide
  source 1..25: mol_type = other DNA
tctgcctcactcctgaatgagcagg

SEQ ID NO: 36043 - DNA, 25 bp, synthetic construct
  misc_feature 1..25: note = Oligonucleotide
  source 1..25: mol_type = other DNA
ctctctgcctcactcctgaatgagc

SEQ ID NO: 36044 - DNA, 25 bp, synthetic construct
  misc_feature 1..25: note = Oligonucleotide
  source 1..25: mol_type = other DNA
agcctctctgcctcactcctgaatg

SEQ ID NO: 36045 - DNA, 25 bp, synthetic construct
  misc_feature 1..25: note = Oligonucleotide
  source 1..25: mol_type = other DNA
attagcctctctgcctcactcctga

SEQ ID NO: 36046 - DNA, 25 bp, synthetic construct
  misc_feature 1..25: note = Oligonucleotide
  source 1..25: mol_type = other DNA
aggattagcctctctgcctcactcc

SEQ ID NO: 36047 - DNA, 25 bp, synthetic construct
  misc_feature 1..25: note = Oligonucleotide
  source 1..25: mol_type = other DNA
tctaggattagcctctctgcctcac

SEQ ID NO: 36048 - DNA, 25 bp, synthetic construct
  misc_feature 1..25: note = Oligonucleotide
  source 1..25: mol_type = other DNA
aggtctaggattagcctctctgcct

SEQ ID NO: 36049 - DNA, 25 bp, synthetic construct
  misc_feature 1..25: note = Oligonucleotide
  source 1..25: mol_type = other DNA
cagaggtctaggattagcctctctg

SEQ ID NO: 36050 - DNA, 25 bp, synthetic construct
  misc_feature 1..25: note = Oligonucleotide
  source 1..25: mol_type = other DNA
tgccagaggtctaggattagcctct

SEQ ID NO: 36051 - DNA, 25 bp, synthetic construct
  misc_feature 1..25: note = Oligonucleotide
  source 1..25: mol_type = other DNA
gagtgccagaggtctaggattagcc

SEQ ID NO: 36052 - DNA, 25 bp, synthetic construct
  misc_feature 1..25: note = Oligonucleotide
  source 1..25: mol_type = other DNA
cccgagtgccagaggtctaggatta

SEQ ID NO: 36053 - DNA, 25 bp, synthetic construct
  misc_feature 1..25: note = Oligonucleotide
  source 1..25: mol_type = other DNA
tgacccgagtgccagaggtctagga

SEQ ID NO: 36054 - DNA, 25 bp, synthetic construct
  misc_feature 1..25: note = Oligonucleotide
  source 1..25: mol_type = other DNA
tcatgacccgagtgccagaggtcta

SEQ ID NO: 36055 - DNA, 25 bp, synthetic construct
  misc_feature 1..25: note = Oligonucleotide
  source 1..25: mol_type = other DNA
ccctcatgacccgagtgccagaggt

SEQ ID NO: 36056 - DNA, 25 bp, synthetic construct
  misc_feature 1..25: note = Oligonucleotide
  source 1..25: mol_type = other DNA
ggaccctcatgacccgagtgccaga

SEQ ID NO: 36057 - DNA, 25 bp, synthetic construct
  misc_feature 1..25: note = Oligonucleotide
  source 1..25: mol_type = other DNA
cttggaccctcatgacccgagtgcc

SEQ ID NO: 36058 - DNA, 25 bp, synthetic construct
  misc_feature 1..25: note = Oligonucleotide
  source 1..25: mol_type = other DNA
gaccttggaccctcatgacccgagt

SEQ ID NO: 36059 - DNA, 25 bp, synthetic construct
  misc_feature 1..25: note = Oligonucleotide
  source 1..25: mol_type = other DNA
actgaccttggaccctcatgacccg

SEQ ID NO: 36060 - DNA, 25 bp, synthetic construct
  misc_feature 1..25: note = Oligonucleotide
  source 1..25: mol_type = other DNA
gtgactgaccttggaccctcatgac

SEQ ID NO: 36061 - DNA, 25 bp, synthetic construct
  misc_feature 1..25: note = Oligonucleotide
  source 1..25: mol_type = other DNA
cccgtgactgaccttggaccctcat

SEQ ID NO: 36062 - DNA, 25 bp, synthetic construct
  misc_feature 1..25: note = Oligonucleotide
  source 1..25: mol_type = other DNA
ctccccgtgactgaccttggaccct

SEQ ID NO: 36063 - DNA, 25 bp, synthetic construct
  misc_feature 1..25: note = Oligonucleotide
  source 1..25: mol_type = other DNA
cagctccccgtgactgaccttggac

SEQ ID NO: 36064 - DNA, 25 bp, synthetic construct
  misc_feature 1..25: note = Oligonucleotide
  source 1..25: mol_type = other DNA
ggtcagctccccgtgactgaccttg

SEQ ID NO: 36065 - DNA, 25 bp, synthetic construct
  misc_feature 1..25: note = Oligonucleotide
  source 1..25: mol_type = other DNA
acaggtcagctccccgtgactgacc

SEQ ID NO: 36066 - DNA, 25 bp, synthetic construct
  misc_feature 1..25: note = Oligonucleotide
  source 1..25: mol_type = other DNA
ttgacaggtcagctccccgtgactg

SEQ ID NO: 36067 - DNA, 25 bp, synthetic construct
  misc_feature 1..25: note = Oligonucleotide
  source 1..25: mol_type = other DNA
caattgacaggtcagctccccgtga

SEQ ID NO: 36068 - DNA, 25 bp, synthetic construct
  misc_feature 1..25: note = Oligonucleotide
  source 1..25: mol_type = other DNA
cttcaattgacaggtcagctccccg

SEQ ID NO: 36069 - DNA, 25 bp, synthetic construct
  misc_feature 1..25: note = Oligonucleotide
  source 1..25: mol_type = other DNA
gatcttcaattgacaggtcagctcc

SEQ ID NO: 36070 - DNA, 25 bp, synthetic construct
  misc_feature 1..25: note = Oligonucleotide
  source 1..25: mol_type = other DNA
ttggatcttcaattgacaggtcagc

SEQ ID NO: 36071 - DNA, 25 bp, synthetic construct
  misc_feature 1..25: note = Oligonucleotide
  source 1..25: mol_type = other DNA
agtttggatcttcaattgacaggtc

SEQ ID NO: 36072 - DNA, 25 bp, synthetic construct
  misc_feature 1..25: note = Oligonucleotide
  source 1..25: mol_type = other DNA
atcagtttggatcttcaattgacag

SEQ ID NO: 36073 - DNA, 25 bp, synthetic construct
  misc_feature 1..25: note = Oligonucleotide
  source 1..25: mol_type = other DNA
ttgatcagtttggatcttcaattga

SEQ ID NO: 36074 - DNA, 25 bp, synthetic construct
  misc_feature 1..25: note = Oligonucleotide
  source 1..25: mol_type = other DNA
ttattgatcagtttggatcttcaat

SEQ ID NO: 36075 - DNA, 25 bp, synthetic construct
  misc_feature 1..25: note = Oligonucleotide
  source 1..25: mol_type = other DNA
ggcttattgatcagtttggatcttc

SEQ ID NO: 36076 - DNA, 25 bp, synthetic construct
  misc_feature 1..25: note = Oligonucleotide
  source 1..25: mol_type = other DNA
gctggcttattgatcagtttggatc

SEQ ID NO: 36077 - DNA, 25 bp, synthetic construct
  misc_feature 1..25: note = Oligonucleotide
  source 1..25: mol_type = other DNA
ggtgctggcttattgatcagtttgg

SEQ ID NO: 36078 - DNA, 25 bp, synthetic construct
  misc_feature 1..25: note = Oligonucleotide
  source 1..25: mol_type = other DNA
actggtgctggcttattgatcagtt

SEQ ID NO: 36079 - DNA, 25 bp, synthetic construct
  misc_feature 1..25: note = Oligonucleotide
  source 1..25: mol_type = other DNA
cctactggtgctggcttattgatca

SEQ ID NO: 36080 - DNA, 25 bp, synthetic construct
  misc_feature 1..25: note = Oligonucleotide
  source 1..25: mol_type = other DNA
ctgcctactggtgctggcttattga

SEQ ID NO: 36081 - DNA, 25 bp, synthetic construct
  misc_feature 1..25: note = Oligonucleotide
  source 1..25: mol_type = other DNA
cagctgcctactggtgctggcttat

SEQ ID NO: 36082 - DNA, 25 bp, synthetic construct
  misc_feature 1..25: note = Oligonucleotide
  source 1..25: mol_type = other DNA
acccagctgcctactggtgctggct

SEQ ID NO: 36083 - DNA, 25 bp, synthetic construct
  misc_feature 1..25: note = Oligonucleotide
  source 1..25: mol_type = other DNA
gggacccagctgcctactggtgctg

SEQ ID NO: 36084 - DNA, 25 bp, synthetic construct
  misc_feature 1..25: note = Oligonucleotide
  source 1..25: mol_type = other DNA
cctgggacccagctgcctactggtg

SEQ ID NO: 36085 - DNA, 25 bp, synthetic construct
  misc_feature 1..25: note = Oligonucleotide
  source 1..25: mol_type = other DNA
aatcctgggacccagctgcctactg

SEQ ID NO: 36086 - DNA, 25 bp, synthetic construct
  misc_feature 1..25: note = Oligonucleotide
  source 1..25: mol_type = other DNA
gagaatcctgggacccagctgccta

SEQ ID NO: 36087 - DNA, 25 bp, synthetic construct
  misc_feature 1..25: note = Oligonucleotide
  source 1..25: mol_type = other DNA
caggagaatcctgggacccagctgc

SEQ ID NO: 36088 - DNA, 25 bp, synthetic construct
  misc_feature 1..25: note = Oligonucleotide
  source 1..25: mol_type = other DNA
tggcaggagaatcctgggacccagc

SEQ ID NO: 36089 - DNA, 25 bp, synthetic construct
  misc_feature 1..25: note = Oligonucleotide
  source 1..25: mol_type = other DNA
ctctggcaggagaatcctgggaccc

SEQ ID NO: 36090 - DNA, 25 bp, synthetic construct
  misc_feature 1..25: note = Oligonucleotide
  source 1..25: mol_type = other DNA
agcctctggcaggagaatcctggga

SEQ ID NO: 36091 - DNA, 25 bp, synthetic construct
  misc_feature 1..25: note = Oligonucleotide
  source 1..25: mol_type = other DNA
gacagcctctggcaggagaatcctg

SEQ ID NO: 36092 - DNA, 25 bp, synthetic construct
  misc_feature 1..25: note = Oligonucleotide
  source 1..25: mol_type = other DNA
tgtgacagcctctggcaggagaatc

SEQ ID NO: 36093 - DNA, 25 bp, synthetic construct
  misc_feature 1..25: note = Oligonucleotide
  source 1..25: mol_type = other DNA
ctatgtgacagcctctggcaggaga

SEQ ID NO: 36094 - DNA, 25 bp, synthetic construct
  misc_feature 1..25: note = Oligonucleotide
  source 1..25: mol_type = other DNA
tggctatgtgacagcctctggcagg

SEQ ID NO: 36095 - DNA, 25 bp, synthetic construct
  misc_feature 1..25: note = Oligonucleotide
  source 1..25: mol_type = other DNA
ctgtggctatgtgacagcctctggc

SEQ ID NO: 36096 - DNA, 25 bp, synthetic construct
  misc_feature 1..25: note = Oligonucleotide
  source 1..25: mol_type = other DNA
tgactgtggctatgtgacagcctct

SEQ ID NO: 36097 - DNA, 25 bp, synthetic construct
  misc_feature 1..25: note = Oligonucleotide
  source 1..25: mol_type = other DNA
agctgactgtggctatgtgacagcc

SEQ ID NO: 36098 - DNA, 25 bp, synthetic construct
  misc_feature 1..25: note = Oligonucleotide
  source 1..25: mol_type = other DNA
tgcagctgactgtggctatgtgaca

SEQ ID NO: 36099 - DNA, 25 bp, synthetic construct
  misc_feature 1..25: note = Oligonucleotide
  source 1..25: mol_type = other DNA
acatgcagctgactgtggctatgtg

SEQ ID NO: 36100 - DNA, 25 bp, synthetic construct
  misc_feature 1..25: note = Oligonucleotide
  source 1..25: mol_type = other DNA
tgaacatgcagctgactgtggctat

SEQ ID NO: 36101 - DNA, 25 bp, synthetic construct
  misc_feature 1..25: note = Oligonucleotide
  source 1..25: mol_type = other DNA
ttctgaacatgcagctgactgtggc

SEQ ID NO: 36102 - DNA, 25 bp, synthetic construct
  misc_feature 1..25: note = Oligonucleotide
  source 1..25: mol_type = other DNA
cccttctgaacatgcagctgactgt

SEQ ID NO: 36103 - DNA, 25 bp, synthetic construct
  misc_feature 1..25: note = Oligonucleotide
  source 1..25: mol_type = other DNA
agtcccttctgaacatgcagctgac

SEQ ID NO: 36104 - DNA, 25 bp, synthetic construct
  misc_feature 1..25: note = Oligonucleotide
  source 1..25: mol_type = other DNA
aagagtcccttctgaacatgcagct

SEQ ID NO: 36105 - DNA, 25 bp, synthetic construct
  misc_feature 1..25: note = Oligonucleotide
  source 1..25: mol_type = other DNA
tagaagagtcccttctgaacatgca

SEQ ID NO: 36106 - DNA, 25 bp, synthetic construct
  misc_feature 1..25: note = Oligonucleotide
  source 1..25: mol_type = other DNA
gaatagaagagtcccttctgaacat

SEQ ID NO: 36107 - DNA, 25 bp, synthetic construct
  misc_feature 1..25: note = Oligonucleotide
  source 1..25: mol_type = other DNA
gctgaatagaagagtcccttctgaa

SEQ ID NO: 36108 - DNA, 25 bp, synthetic construct
  misc_feature 1..25: note = Oligonucleotide
  source 1..25: mol_type = other DNA
ggtgctgaatagaagagtcccttct

SEQ ID NO: 36109 - DNA, 25 bp, synthetic construct
  misc_feature 1..25: note = Oligonucleotide
  source 1..25: mol_type = other DNA
cgtggtgctgaatagaagagtccct

SEQ ID NO: 36110 - DNA, 25 bp, synthetic construct
  misc_feature 1..25: note = Oligonucleotide
  source 1..25: mol_type = other DNA
ccccgtggtgctgaatagaagagtc

SEQ ID NO: 36111 - DNA, 25 bp, synthetic construct
  misc_feature 1..25: note = Oligonucleotide
  source 1..25: mol_type = other DNA
aagccccgtggtgctgaatagaaga

SEQ ID NO: 36112 - DNA, 25 bp, synthetic construct
  misc_feature 1..25: note = Oligonucleotide
  source 1..25: mol_type = other DNA
caaaagccccgtggtgctgaataga

SEQ ID NO: 36113 - DNA, 25 bp, synthetic construct
  misc_feature 1..25: note = Oligonucleotide
  source 1..25: mol_type = other DNA
gcccaaaagccccgtggtgctgaat

SEQ ID NO: 36114 - DNA, 25 bp, synthetic construct
  misc_feature 1..25: note = Oligonucleotide
  source 1..25: mol_type = other DNA
gctgcccaaaagccccgtggtgctg

SEQ ID NO: 36115 - DNA, 25 bp, synthetic construct
  misc_feature 1..25: note = Oligonucleotide
  source 1..25: mol_type = other DNA
caggctgcccaaaagccccgtggtg

SEQ ID NO: 36116 - DNA, 25 bp, synthetic construct
  misc_feature 1..25: note = Oligonucleotide
  source 1..25: mol_type = other DNA
tctcaggctgcccaaaagccccgtg

SEQ ID NO: 36117 - DNA, 25 bp, synthetic construct
  misc_feature 1..25: note = Oligonucleotide
  source 1..25: mol_type = other DNA
ggatctcaggctgcccaaaagcccc

SEQ ID NO: 36118 - DNA, 25 bp, synthetic construct
  misc_feature 1..25: note = Oligonucleotide
  source 1..25: mol_type = other DNA
tacggatctcaggctgcccaaaagc

SEQ ID NO: 36119 - DNA, 25 bp, synthetic construct
  misc_feature 1..25: note = Oligonucleotide
  source 1..25: mol_type = other DNA
gattacggatctcaggctgcccaaa

SEQ ID NO: 36120 - DNA, 25 bp, synthetic construct
  misc_feature 1..25: note = Oligonucleotide
  source 1..25: mol_type = other DNA
caggattacggatctcaggctgccc

SEQ ID NO: 36121 - DNA, 25 bp, synthetic construct
  misc_feature 1..25: note = Oligonucleotide
  source 1..25: mol_type = other DNA
tcccaggattacggatctcaggctg

SEQ ID NO: 36122 - DNA, 25 bp, synthetic construct
  misc_feature 1..25: note = Oligonucleotide
  source 1..25: mol_type = other DNA
gggtcccaggattacggatctcagg

SEQ ID NO: 36123 - DNA, 25 bp, synthetic construct
  misc_feature 1..25: note = Oligonucleotide
  source 1..25: mol_type = other DNA
cctgggtcccaggattacggatctc

SEQ ID NO: 36124 - DNA, 25 bp, synthetic construct
  misc_feature 1..25: note = Oligonucleotide
  source 1..25: mol_type = other DNA
gtccctgggtcccaggattacggat

SEQ ID NO: 36125 - DNA, 25 bp, synthetic construct
  misc_feature 1..25: note = Oligonucleotide
  source 1..25: mol_type = other DNA
agagtccctgggtcccaggattacg

SEQ ID NO: 36126 - DNA, 25 bp, synthetic construct
  misc_feature 1..25: note = Oligonucleotide
  source 1..25: mol_type = other DNA
ggcagagtccctgggtcccaggatt

SEQ ID NO: 36127 - DNA, 25 bp, synthetic construct
  misc_feature 1..25: note = Oligonucleotide
  source 1..25: mol_type = other DNA
tagggcagagtccctgggtcccagg

SEQ ID NO: 36128 - DNA, 25 bp, synthetic construct
  misc_feature 1..25: note = Oligonucleotide
  source 1..25: mol_type = other DNA
ccatagggcagagtccctgggtccc

SEQ ID NO: 36129 - DNA, 25 bp, synthetic construct
  misc_feature 1..25: note = Oligonucleotide
  source 1..25: mol_type = other DNA
tttccatagggcagagtccctgggt

SEQ ID NO: 36130 - DNA, 25 bp, synthetic construct
  misc_feature 1..25: note = Oligonucleotide
  source 1..25: mol_type = other DNA
ccgtttccatagggcagagtccctg

SEQ ID NO: 36131 - DNA, 25 bp, synthetic construct
  misc_feature 1..25: note = Oligonucleotide
  source 1..25: mol_type = other DNA
cttccgtttccatagggcagagtcc

SEQ ID NO: 36132 - DNA, 25 bp, synthetic construct
  misc_feature 1..25: note = Oligonucleotide
  source 1..25: mol_type = other DNA
gtccttccgtttccatagggcagag

SEQ ID NO: 36133 - DNA, 25 bp, synthetic construct
  misc_feature 1..25: note = Oligonucleotide
  source 1..25: mol_type = other DNA
gcagtccttccgtttccatagggca

SEQ ID NO: 36134 - DNA, 25 bp, synthetic construct
  misc_feature 1..25: note = Oligonucleotide
  source 1..25: mol_type = other DNA
agcgcagtccttccgtttccatagg

SEQ ID NO: 36135 - DNA, 25 bp, synthetic construct
  misc_feature 1..25: note = Oligonucleotide
  source 1..25: mol_type = other DNA
caaagcgcagtccttccgtttccat

SEQ ID NO: 36136 - DNA, 25 bp, synthetic construct
  misc_feature 1..25: note = Oligonucleotide
  source 1..25: mol_type = other DNA
gagcaaagcgcagtccttccgtttc

SEQ ID NO: 36137 - DNA, 25 bp, synthetic construct
  misc_feature 1..25: note = Oligonucleotide
  source 1..25: mol_type = other DNA
agagagcaaagcgcagtccttccgt

SEQ ID NO: 36138 - DNA, 25 bp, synthetic construct
  misc_feature 1..25: note = Oligonucleotide
  source 1..25: mol_type = other DNA
cccagagagcaaagcgcagtccttc

SEQ ID NO: 36139 - DNA, 25 bp, synthetic construct
  misc_feature 1..25: note = Oligonucleotide
  source 1..25: mol_type = other DNA
aagcccagagagcaaagcgcagtcc

SEQ ID NO: 36140 - DNA, 25 bp, synthetic construct
  misc_feature 1..25: note = Oligonucleotide
  source 1..25: mol_type = other DNA
gaaaagcccagagagcaaagcgcag

SEQ ID NO: 36141 - DNA, 25 bp, synthetic construct
  misc_feature 1..25: note = Oligonucleotide
  source 1..25: mol_type = other DNA
gcagaaaagcccagagagcaaagcg

SEQ ID NO: 36142 - DNA, 25 bp, synthetic construct
  misc_feature 1..25: note = Oligonucleotide
  source 1..25: mol_type = other DNA
caggcagaaaagcccagagagcaaa

SEQ ID NO: 36143 - DNA, 25 bp, synthetic construct
  misc_feature 1..25: note = Oligonucleotide
  source 1..25: mol_type = other DNA
cttcaggcagaaaagcccagagagc

SEQ ID NO: 36144 - DNA, 25 bp, synthetic construct
  misc_feature 1..25: note = Oligonucleotide
  source 1..25: mol_type = other DNA
tttcttcaggcagaaaagcccagag

SEQ ID NO: 36145 - DNA, 25 bp, synthetic construct
  misc_feature 1..25: note = Oligonucleotide
  source 1..25: mol_type = other DNA
cagtttcttcaggcagaaaagccca

SEQ ID NO: 36146 - DNA, 25 bp, synthetic construct
  misc_feature 1..25: note = Oligonucleotide
  source 1..25: mol_type = other DNA
caccagtttcttcaggcagaaaagc

SEQ ID NO: 36147 - DNA, 25 bp, synthetic construct
  misc_feature 1..25: note = Oligonucleotide
  source 1..25: mol_type = other DNA
attcaccagtttcttcaggcagaaa

SEQ ID NO: 36148 - DNA, 25 bp, synthetic construct
  misc_feature 1..25: note = Oligonucleotide
  source 1..25: mol_type = other DNA
ttcattcaccagtttcttcaggcag

SEQ ID NO: 36149 - DNA, 25 bp, synthetic construct
  misc_feature 1..25: note = Oligonucleotide
  source 1..25: mol_type = other DNA
gtcttcattcaccagtttcttcagg

SEQ ID NO: 36150 - DNA, 25 bp, synthetic construct
  misc_feature 1..25: note = Oligonucleotide
  source 1..25: mol_type = other DNA
agcgtcttcattcaccagtttcttc

SEQ ID NO: 36151 - DNA, 25 bp, synthetic construct
  misc_feature 1..25: note = Oligonucleotide
  source 1..25: mol_type = other DNA
aggagcgtcttcattcaccagtttc

SEQ ID NO: 36152 - DNA, 25 bp, synthetic construct
  misc_feature 1..25: note = Oligonucleotide
  source 1..25: mol_type = other DNA
gaaaggagcgtcttcattcaccagt

SEQ ID NO: 36153 - DNA, 25 bp, synthetic construct
  misc_feature 1..25: note = Oligonucleotide
  source 1..25: mol_type = other DNA
agggaaaggagcgtcttcattcacc

SEQ ID NO: 36154 - DNA, 25 bp, synthetic construct
  misc_feature 1..25: note = Oligonucleotide
  source 1..25: mol_type = other DNA
gggagggaaaggagcgtcttcattc

SEQ ID NO: 36155 - DNA, 25 bp, synthetic construct
  misc_feature 1..25: note = Oligonucleotide
  source 1..25: mol_type = other DNA
gaggggagggaaaggagcgtcttca

SEQ ID NO: 36156 - DNA, 25 bp, synthetic construct
  misc_feature 1..25: note = Oligonucleotide
  source 1..25: mol_type = other DNA
ccagaggggagggaaaggagcgtct

SEQ ID NO: 36157 - DNA, 25 bp, synthetic construct
  misc_feature 1..25: note = Oligonucleotide
  source 1..25: mol_type = other DNA
agcccagaggggagggaaaggagcg

SEQ ID NO: 36158 - DNA, 25 bp, synthetic construct
  misc_feature 1..25: note = Oligonucleotide
  source 1..25: mol_type = other DNA
ctcagcccagaggggagggaaagga

SEQ ID NO: 36159 - DNA, 25 bp, synthetic construct
  misc_feature 1..25: note = Oligonucleotide
  source 1..25: mol_type = other DNA
acactcagcccagaggggagggaaa

SEQ ID NO: 36160 - DNA, 25 bp, synthetic construct
  misc_feature 1..25: note = Oligonucleotide
  source 1..25: mol_type = other DNA
ggaacactcagcccagaggggaggg

SEQ ID NO: 36161 - DNA, 25 bp, synthetic construct
  misc_feature 1..25: note = Oligonucleotide
  source 1..25: mol_type = other DNA
gagggaacactcagcccagagggga

SEQ ID NO: 36162 - DNA, 25 bp, synthetic construct
  misc_feature 1..25: note = Oligonucleotide
  source 1..25: mol_type = other DNA
gaagagggaacactcagcccagagg

SEQ ID NO: 36163 - DNA, 25 bp, synthetic construct
  misc_feature 1..25: note = Oligonucleotide
  source 1..25: mol_type = other DNA
gcagaagagggaacactcagcccag

SEQ ID NO: 36164 - DNA, 25 bp, synthetic construct
  misc_feature 1..25: note = Oligonucleotide
  source 1..25: mol_type = other DNA
gttgcagaagagggaacactcagcc

SEQ ID NO: 36165 - DNA, 25 bp, synthetic construct
  misc_feature 1..25: note = Oligonucleotide
  source 1..25: mol_type = other DNA
cttgttgcagaagagggaacactca

SEQ ID NO: 36166 - DNA, 25 bp, synthetic construct
  misc_feature 1..25: note = Oligonucleotide
  source 1..25: mol_type = other DNA
aggcttgttgcagaagagggaacac

SEQ ID NO: 36167 - DNA, 25 bp, synthetic construct
  misc_feature 1..25: note = Oligonucleotide
  source 1..25: mol_type = other DNA
ctgaggcttgttgcagaagagggaa

SEQ ID NO: 36168 - DNA, 25 bp, synthetic construct
  misc_feature 1..25: note = Oligonucleotide
  source 1..25: mol_type = other DNA
gtcctgaggcttgttgcagaagagg

SEQ ID NO: 36169 - DNA, 25 bp, synthetic construct
  misc_feature 1..25: note = Oligonucleotide
  source 1..25: mol_type = other DNA
cctgtcctgaggcttgttgcagaag

SEQ ID NO: 36170 - DNA, 25 bp, synthetic construct
  misc_feature 1..25: note = Oligonucleotide
  source 1..25: mol_type = other DNA
caacctgtcctgaggcttgttgcag

SEQ ID NO: 36171 - DNA, 25 bp, synthetic construct
  misc_feature 1..25: note = Oligonucleotide
  source 1..25: mol_type = other DNA
cagcaacctgtcctgaggcttgttg

SEQ ID NO: 36172 - DNA, 25 bp, synthetic construct
  misc_feature 1..25: note = Oligonucleotide
  source 1..25: mol_type = other DNA
ctccagcaacctgtcctgaggcttg

SEQ ID NO: 36173 - DNA, 25 bp, synthetic construct
  misc_feature 1..25: note = Oligonucleotide
  source 1..25: mol_type = other DNA
tgactccagcaacctgtcctgaggc

SEQ ID NO: 36174 - DNA, 25 bp, synthetic construct
  misc_feature 1..25: note = Oligonucleotide
  source 1..25: mol_type = other DNA
aagtgactccagcaacctgtcctga

SEQ ID NO: 36175 - DNA, 25 bp, synthetic construct
  misc_feature 1..25: note = Oligonucleotide
  source 1..25: mol_type = other DNA
gcaaagtgactccagcaacctgtcc

SEQ ID NO: 36176 - DNA, 25 bp, synthetic construct
  misc_feature 1..25: note = Oligonucleotide
  source 1..25: mol_type = other DNA
tctgcaaagtgactccagcaacctg

SEQ ID NO: 36177 - DNA, 25 bp, synthetic construct
  misc_feature 1..25: note = Oligonucleotide
  source 1..25: mol_type = other DNA
ggctctgcaaagtgactccagcaac

SEQ ID NO: 36178 - DNA, 25 bp, synthetic construct
  misc_feature 1..25: note = Oligonucleotide
  source 1..25: mol_type = other DNA
ccgggctctgcaaagtgactccagc

SEQ ID NO: 36179 - DNA, 25 bp, synthetic construct
  misc_feature 1..25: note = Oligonucleotide
  source 1..25: mol_type = other DNA
agaccgggctctgcaaagtgactcc

SEQ ID NO: 36180 - DNA, 25 bp, synthetic construct
  misc_feature 1..25: note = Oligonucleotide
  source 1..25: mol_type = other DNA
ggaagaccgggctctgcaaagtgac

SEQ ID NO: 36181 - DNA, 25 bp, synthetic construct
  misc_feature 1..25: note = Oligonucleotide
  source 1..25: mol_type = other DNA
tctggaagaccgggctctgcaaagt

SEQ ID NO: 36182 - DNA, 25 bp, synthetic construct
  misc_feature 1..25: note = Oligonucleotide
  source 1..25: mol_type = other DNA
tcctctggaagaccgggctctgcaa

SEQ ID NO: 36183 - DNA, 25 bp, synthetic construct
  misc_feature 1..25: note = Oligonucleotide
  source 1..25: mol_type = other DNA
aactcctctggaagaccgggctctg

SEQ ID NO: 36184 - DNA, 25 bp, synthetic construct
  misc_feature 1..25: note = Oligonucleotide
  source 1..25: mol_type = other DNA
agcaactcctctggaagaccgggct

SEQ ID NO: 36185 - DNA, 25 bp, synthetic construct
  misc_feature 1..25: note = Oligonucleotide
  source 1..25: mol_type = other DNA
gtgagcaactcctctggaagaccgg

SEQ ID NO: 36186 - DNA, 25 bp, synthetic construct
  misc_feature 1..25: note = Oligonucleotide
  source 1..25: mol_type = other DNA
gctgtgagcaactcctctggaagac

SEQ ID NO: 36187 - DNA, 25 bp, synthetic construct
  misc_feature 1..25: note = Oligonucleotide
  source 1..25: mol_type = other DNA
gaagctgtgagcaactcctctggaa

SEQ ID NO: 36188 - DNA, 25 bp, synthetic construct
  misc_feature 1..25: note = Oligonucleotide
  source 1..25: mol_type = other DNA
cctgaagctgtgagcaactcctctg

SEQ ID NO: 36189 - DNA, 25 bp, synthetic construct
  misc_feature 1..25: note = Oligonucleotide
  source 1..25: mol_type = other DNA
tggcctgaagctgtgagcaactcct

SEQ ID NO: 36190 - DNA, 25 bp, synthetic construct
  misc_feature 1..25: note = Oligonucleotide
  source 1..25: mol_type = other DNA
tggtggcctgaagctgtgagcaact

SEQ ID NO: 36191 - DNA, 25 bp, synthetic construct
  misc_feature 1..25: note = Oligonucleotide
  source 1..25: mol_type = other DNA
ttatggtggcctgaagctgtgagca

SEQ ID NO: 36192 - DNA, 25 bp, synthetic construct
  misc_feature 1..25: note = Oligonucleotide
  source 1..25: mol_type = other DNA
aaattatggtggcctgaagctgtga

SEQ ID NO: 36193 - DNA, 25 bp, synthetic construct
  misc_feature 1..25: note = Oligonucleotide
  source 1..25: mol_type = other DNA
ggaaaattatggtggcctgaagctg

SEQ ID NO: 36194 - DNA, 25 bp, synthetic construct
  misc_feature 1..25: note = Oligonucleotide
  source 1..25: mol_type = other DNA
cctggaaaattatggtggcctgaag

SEQ ID NO: 36195 - DNA, 25 bp, synthetic construct
  misc_feature 1..25: note = Oligonucleotide
  source 1..25: mol_type = other DNA
aagcctggaaaattatggtggcctg

SEQ ID NO: 36196 - DNA, 25 bp, synthetic construct
  misc_feature 1..25: note = Oligonucleotide
  source 1..25: mol_type = other DNA
aaaaagcctggaaaattatggtggc

SEQ ID NO: 36197 - DNA, 25 bp, synthetic construct
  misc_feature 1..25: note = Oligonucleotide
  source 1..25: mol_type = other DNA
agaaaaaagcctggaaaattatggt

SEQ ID NO: 36198 - DNA, 25 bp, synthetic construct
  misc_feature 1..25: note = Oligonucleotide
  source 1..25: mol_type = other DNA
ctcagaaaaaagcctggaaaattat

SEQ ID NO: 36199 - DNA, 25 bp, synthetic construct
  misc_feature 1..25: note = Oligonucleotide
  source 1..25: mol_type = other DNA
ctgctcagaaaaaagcctggaaaat

SEQ ID NO: 36200 - DNA, 25 bp, synthetic construct
  misc_feature 1..25: note = Oligonucleotide
  source 1..25: mol_type = other DNA
actctgctcagaaaaaagcctggaa

SEQ ID NO: 36201 - DNA, 25 bp, synthetic construct
  misc_feature 1..25: note = Oligonucleotide
  source 1..25: mol_type = other DNA
cagactctgctcagaaaaaagcctg

SEQ ID NO: 36202 - DNA, 25 bp, synthetic construct
  misc_feature 1..25: note = Oligonucleotide
  source 1..25: mol_type = other DNA
ccccagactctgctcagaaaaaagc

SEQ ID NO: 36203 - DNA, 25 bp, synthetic construct
  misc_feature 1..25: note = Oligonucleotide
  source 1..25: mol_type = other DNA
ctcccccagactctgctcagaaaaa

SEQ ID NO: 36204 - DNA, 25 bp, synthetic construct
  misc_feature 1..25: note = Oligonucleotide
  source 1..25: mol_type = other DNA
atcctcccccagactctgctcagaa

SEQ ID NO: 36205 - DNA, 25 bp, synthetic construct
  misc_feature 1..25: note = Oligonucleotide
  source 1..25: mol_type = other DNA
ttcatcctcccccagactctgctca

SEQ ID NO: 36206 - DNA, 25 bp, synthetic construct
  misc_feature 1..25: note = Oligonucleotide
  source 1..25: mol_type = other DNA
cccttcatcctcccccagactctgc

SEQ ID NO: 36207 - DNA, 25 bp, synthetic construct
  misc_feature 1..25: note = Oligonucleotide
  source 1..25: mol_type = other DNA
tgtcccttcatcctcccccagactc

SEQ ID NO: 36208 - DNA, 25 bp, synthetic construct
  misc_feature 1..25: note = Oligonucleotide
  source 1..25: mol_type = other DNA
agctgtcccttcatcctcccccaga

SEQ ID NO: 36209 - DNA, 25 bp, synthetic construct
  misc_feature 1..25: note = Oligonucleotide
  source 1..25: mol_type = other DNA
ctaagctgtcccttcatcctccccc

SEQ ID NO: 36210 - DNA, 25 bp, synthetic construct
  misc_feature 1..25: note = Oligonucleotide
  source 1..25: mol_type = other DNA
gcgctaagctgtcccttcatcctcc

SEQ ID NO: 36211 - DNA, 25 bp, synthetic construct
  misc_feature 1..25: note = Oligonucleotide
  source 1..25: mol_type = other DNA
tctgcgctaagctgtcccttcatcc

SEQ ID NO: 36212 - DNA, 25 bp, synthetic construct
  misc_feature 1..25: note = Oligonucleotide
  source 1..25: mol_type = other DNA
ggctctgcgctaagctgtcccttca

SEQ ID NO: 36213 - DNA, 25 bp, synthetic construct
  misc_feature 1..25: note = Oligonucleotide
  source 1..25: mol_type = other DNA
agaggctctgcgctaagctgtccct

SEQ ID NO: 36214 - DNA, 25 bp, synthetic construct
  misc_feature 1..25: note = Oligonucleotide
  source 1..25: mol_type = other DNA
ggtagaggctctgcgctaagctgtc

SEQ ID NO: 36215 - DNA, 25 bp, synthetic construct
  misc_feature 1..25: note = Oligonucleotide
  source 1..25: mol_type = other DNA
gtgggtagaggctctgcgctaagct

SEQ ID NO: 36216 - DNA, 25 bp, synthetic construct
  misc_feature 1..25: note = Oligonucleotide
  source 1..25: mol_type = other DNA
agtgtgggtagaggctctgcgctaa

SEQ ID NO: 36217 - DNA, 25 bp, synthetic construct
  misc_feature 1..25: note = Oligonucleotide
  source 1..25: mol_type = other DNA
agaagtgtgggtagaggctctgcgc

SEQ ID NO: 36218 - DNA, 25 bp, synthetic construct
  misc_feature 1..25: note = Oligonucleotide
  source 1..25: mol_type = other DNA
tccagaagtgtgggtagaggctctg

SEQ ID NO: 36219 - DNA, 25 bp, synthetic construct
  misc_feature 1..25: note = Oligonucleotide
  source 1..25: mol_type = other DNA
agctccagaagtgtgggtagaggct

SEQ ID NO: 36220 - DNA, 25 bp, synthetic construct
  misc_feature 1..25: note = Oligonucleotide
  source 1..25: mol_type = other DNA
ctgagctccagaagtgtgggtagag

SEQ ID NO: 36221 - DNA, 25 bp, synthetic construct
  misc_feature 1..25: note = Oligonucleotide
  source 1..25: mol_type = other DNA
ttcctgagctccagaagtgtgggta

SEQ ID NO: 36222 - DNA, 25 bp, synthetic construct
  misc_feature 1..25: note = Oligonucleotide
  source 1..25: mol_type = other DNA
ggcttcctgagctccagaagtgtgg

SEQ ID NO: 36223 - DNA, 25 bp, synthetic construct
  misc_feature 1..25: note = Oligonucleotide
  source 1..25: mol_type = other DNA
ggtggcttcctgagctccagaagtg

SEQ ID NO: 36224 - DNA, 25 bp, synthetic construct
  misc_feature 1..25: note = Oligonucleotide
  source 1..25: mol_type = other DNA
cagggtggcttcctgagctccagaa

SEQ ID NO: 36225 - DNA, 25 bp, synthetic construct
  misc_feature 1..25: note = Oligonucleotide
  source 1..25: mol_type = other DNA
ggacagggtggcttcctgagctcca

SEQ ID NO: 36226 - DNA, 25 bp, synthetic construct
  misc_feature 1..25: note = Oligonucleotide
  source 1..25: mol_type = other DNA
tggggacagggtggcttcctgagct

SEQ ID NO: 36227 - DNA, 25 bp, synthetic construct
  misc_feature 1..25: note = Oligonucleotide
  source 1..25: mol_type = other DNA
ttctggggacagggtggcttcctga

SEQ ID NO: 36228 - DNA, 25 bp, synthetic construct
  misc_feature 1..25: note = Oligonucleotide
  source 1..25: mol_type = other DNA
gtcttctggggacagggtggcttcc

SEQ ID NO: 36229 - DNA, 25 bp, synthetic construct
  misc_feature 1..25: note = Oligonucleotide
  source 1..25: mol_type = other DNA
gctgtcttctggggacagggtggct

SEQ ID NO: 36230 - DNA, 25 bp, synthetic construct
  misc_feature 1..25: note = Oligonucleotide
  source 1..25: mol_type = other DNA
acagctgtcttctggggacagggtg

SEQ ID NO: 36231 - DNA, 25 bp, synthetic construct
  misc_feature 1..25: note = Oligonucleotide
  source 1..25: mol_type = other DNA
aggacagctgtcttctggggacagg

SEQ ID NO: 36232 - DNA, 25 bp, synthetic construct
  misc_feature 1..25: note = Oligonucleotide
  source 1..25: mol_type = other DNA
cccaggacagctgtcttctggggac

SEQ ID NO: 36233 - DNA, 25 bp, synthetic construct
  misc_feature 1..25: note = Oligonucleotide
  source 1..25: mol_type = other DNA
cttcccaggacagctgtcttctggg

SEQ ID NO: 36234 - DNA, 25 bp, synthetic construct
  misc_feature 1..25: note = Oligonucleotide
  source 1..25: mol_type = other DNA
tggcttcccaggacagctgtcttct

SEQ ID NO: 36235 - DNA, 25 bp, synthetic construct
  misc_feature 1..25: note = Oligonucleotide
  source 1..25: mol_type = other DNA
tgctggcttcccaggacagctgtct

SEQ ID NO: 36236 - DNA, 25 bp, synthetic construct
  misc_feature 1..25: note = Oligonucleotide
  source 1..25: mol_type = other DNA
ccctgctggcttcccaggacagctg

SEQ ID NO: 36237 - DNA, 25 bp, synthetic construct
  misc_feature 1..25: note = Oligonucleotide
  source 1..25: mol_type = other DNA
aagccctgctggcttcccaggacag

SEQ ID NO: 36238 - DNA, 25 bp, synthetic construct
  misc_feature 1..25: note = Oligonucleotide
  source 1..25: mol_type = other DNA
cagaagccctgctggcttcccagga

SEQ ID NO: 36239 - DNA, 25 bp, synthetic construct
  misc_feature 1..25: note = Oligonucleotide
  source 1..25: mol_type = other DNA
ttccagaagccctgctggcttccca

SEQ ID NO: 36240 - DNA, 25 bp, synthetic construct
  misc_feature 1..25: note = Oligonucleotide
  source 1..25: mol_type = other DNA
gacttccagaagccctgctggcttc

SEQ ID NO: 36241 - DNA, 25 bp, synthetic construct
  misc_feature 1..25: note = Oligonucleotide
  source 1..25: mol_type = other DNA
ggggacttccagaagccctgctggc

SEQ ID NO: 36242 - DNA, 25 bp, synthetic construct
  misc_feature 1..25: note = Oligonucleotide
  source 1..25: mol_type = other DNA
agaggggacttccagaagccctgct

SEQ ID NO: 36243 - DNA, 25 bp, synthetic construct
  misc_feature 1..25: note = Oligonucleotide
  source 1..25: mol_type = other DNA
tccagaggggacttccagaagccct

SEQ ID NO: 36244 - DNA, 25 bp, synthetic construct
  misc_feature 1..25: note = Oligonucleotide
  source 1..25: mol_type = other DNA
atttccagaggggacttccagaagc

SEQ ID NO: 36245 - DNA, 25 bp, synthetic construct
  misc_feature 1..25: note = Oligonucleotide
  source 1..25: mol_type = other DNA
ggcatttccagaggggacttccaga

SEQ ID NO: 36246 - DNA, 25 bp, synthetic construct
  misc_feature 1..25: note = Oligonucleotide
  source 1..25: mol_type = other DNA
tcaggcatttccagaggggacttcc

SEQ ID NO: 36247 - DNA, 25 bp, synthetic construct
  misc_feature 1..25: note = Oligonucleotide
  source 1..25: mol_type = other DNA
aaatcaggcatttccagaggggact

SEQ ID NO: 36248 - DNA, 25 bp, synthetic construct
  misc_feature 1..25: note = Oligonucleotide
  source 1..25: mol_type = other DNA
ctcaaatcaggcatttccagagggg

SEQ ID NO: 36249 - DNA, 25 bp, synthetic construct
  misc_feature 1..25: note = Oligonucleotide
  source 1..25: mol_type = other DNA
gtcctcaaatcaggcatttccagag

SEQ ID NO: 36250 - DNA, 25 bp, synthetic construct
  misc_feature 1..25: note = Oligonucleotide
  source 1..25: mol_type = other DNA
ggcgtcctcaaatcaggcatttcca

SEQ ID NO: 36251 - DNA, 25 bp, synthetic construct
  misc_feature 1..25: note = Oligonucleotide
  source 1..25: mol_type = other DNA
catggcgtcctcaaatcaggcattt

SEQ ID NO: 36252 - DNA, 25 bp, synthetic construct
  misc_feature 1..25: note = Oligonucleotide
  source 1..25: mol_type = other DNA
tggcatggcgtcctcaaatcaggca

SEQ ID NO: 36253 - DNA, 25 bp, synthetic construct
  misc_feature 1..25: note = Oligonucleotide
  source 1..25: mol_type = other DNA
tgctggcatggcgtcctcaaatcag

SEQ ID NO: 36254 - DNA, 25 bp, synthetic construct
  misc_feature 1..25: note = Oligonucleotide
  source 1..25: mol_type = other DNA
tgatgctggcatggcgtcctcaaat

SEQ ID NO: 36255 - DNA, 25 bp, synthetic construct
  misc_feature 1..25: note = Oligonucleotide
  source 1..25: mol_type = other DNA
ccctgatgctggcatggcgtcctca

SEQ ID NO: 36256 - DNA, 25 bp, synthetic construct
  misc_feature 1..25: note = Oligonucleotide
  source 1..25: mol_type = other DNA
aaaccctgatgctggcatggcgtcc

SEQ ID NO: 36257 - DNA, 25 bp, synthetic construct
  misc_feature 1..25: note = Oligonucleotide
  source 1..25: mol_type = other DNA
gggaaaccctgatgctggcatggcg

SEQ ID NO: 36258 - DNA, 25 bp, synthetic construct
  misc_feature 1..25: note = Oligonucleotide
  source 1..25: mol_type = other DNA
ctggggaaaccctgatgctggcatg

SEQ ID NO: 36259 - DNA, 25 bp, synthetic construct
  misc_feature 1..25: note = Oligonucleotide
  source 1..25: mol_type = other DNA
tacctggggaaaccctgatgctggc

SEQ ID NO: 36260 - DNA, 25 bp, synthetic construct
  misc_feature 1..25: note = Oligonucleotide
  source 1..25: mol_type = other DNA
aggtacctggggaaaccctgatgct

SEQ ID NO: 36261 - DNA, 25 bp, synthetic construct
  misc_feature 1..25: note = Oligonucleotide
  source 1..25: mol_type = other DNA
cttaggtacctggggaaaccctgat

SEQ ID NO: 36262 - DNA, 25 bp, synthetic construct
  misc_feature 1..25: note = Oligonucleotide
  source 1..25: mol_type = other DNA
tcccttaggtacctggggaaaccct

SEQ ID NO: 36263 - DNA, 25 bp, synthetic construct
  misc_feature 1..25: note = Oligonucleotide
  source 1..25: mol_type = other DNA
tggtcccttaggtacctggggaaac

SEQ ID NO: 36264 - DNA, 25 bp, synthetic construct
  misc_feature 1..25: note = Oligonucleotide
  source 1..25: mol_type = other DNA
ggatggtcccttaggtacctgggga

SEQ ID NO: 36265 - DNA, 25 bp, synthetic construct
  misc_feature 1..25: note = Oligonucleotide
  source 1..25: mol_type = other DNA
gtgggatggtcccttaggtacctgg

SEQ ID NO: 36266 - DNA, 25 bp, synthetic construct
  misc_feature 1..25: note = Oligonucleotide
  source 1..25: mol_type = other DNA
gttgtgggatggtcccttaggtacc

SEQ ID NO: 36267 - DNA, 25 bp, synthetic construct
  misc_feature 1..25: note = Oligonucleotide
  source 1..25: mol_type = other DNA
tgggttgtgggatggtcccttaggt

SEQ ID NO: 36268 - DNA, 25 bp, synthetic construct
  misc_feature 1..25: note = Oligonucleotide
  source 1..25: mol_type = other DNA
cactgggttgtgggatggtccctta

SEQ ID NO: 36269 - DNA, 25 bp, synthetic construct
  misc_feature 1..25: note = Oligonucleotide
  source 1..25: mol_type = other DNA
aaacactgggttgtgggatggtccc

SEQ ID NO: 36270 - DNA, 25 bp, synthetic construct
  misc_feature 1..25: note = Oligonucleotide
  source 1..25: mol_type = other DNA
caaaaacactgggttgtgggatggt

SEQ ID NO: 36271 - DNA, 25 bp, synthetic construct
  misc_feature 1..25: note = Oligonucleotide
  source 1..25: mol_type = other DNA
aagcaaaaacactgggttgtgggat

SEQ ID NO: 36272 - DNA, 25 bp, synthetic construct
  misc_feature 1..25: note = Oligonucleotide
  source 1..25: mol_type = other DNA
tgaaagcaaaaacactgggttgtgg

SEQ ID NO: 36273 - DNA, 25 bp, synthetic construct
  misc_feature 1..25: note = Oligonucleotide
  source 1..25: mol_type = other DNA
ttctgaaagcaaaaacactgggttg

SEQ ID NO: 36274 - DNA, 25 bp, synthetic construct
  misc_feature 1..25: note = Oligonucleotide
  source 1..25: mol_type = other DNA
atcttctgaaagcaaaaacactggg

SEQ ID NO: 36275 - DNA, 25 bp, synthetic construct
  misc_feature 1..25: note = Oligonucleotide
  source 1..25: mol_type = other DNA
tctatcttctgaaagcaaaaacact

SEQ ID NO: 36276 - DNA, 25 bp, synthetic construct
  misc_feature 1..25: note = Oligonucleotide
  source 1..25: mol_type = other DNA
atttctatcttctgaaagcaaaaac

SEQ ID NO: 36277 - DNA, 25 bp, synthetic construct
  misc_feature 1..25: note = Oligonucleotide
  source 1..25: mol_type = other DNA
ctcatttctatcttctgaaagcaaa

SEQ ID NO: 36278 - DNA, 25 bp, synthetic construct
  misc_feature 1..25: note = Oligonucleotide
  source 1..25: mol_type = other DNA
ggcctcatttctatcttctgaaagc

SEQ ID NO: 36279 - DNA, 25 bp, synthetic construct
  misc_feature 1..25: note = Oligonucleotide
  source 1..25: mol_type = other DNA
acaggcctcatttctatcttctgaa

SEQ ID NO: 36280 - DNA, 25 bp, synthetic construct
  misc_feature 1..25: note = Oligonucleotide
  source 1..25: mol_type = other DNA
ccaacaggcctcatttctatcttct

SEQ ID NO: 36281 - DNA, 25 bp, synthetic construct
  misc_feature 1..25: note = Oligonucleotide
  source 1..25: mol_type = other DNA
tgaccaacaggcctcatttctatct

SEQ ID NO: 36282 - DNA, 25 bp, synthetic construct
  misc_feature 1..25: note = Oligonucleotide
  source 1..25: mol_type = other DNA
cagtgaccaacaggcctcatttcta

SEQ ID NO: 36283 - DNA, 25 bp, synthetic construct
  misc_feature 1..25: note = Oligonucleotide
  source 1..25: mol_type = other DNA
cagcagtgaccaacaggcctcattt

SEQ ID NO: 36284 - DNA, 25 bp, synthetic construct
  misc_feature 1..25: note = Oligonucleotide
  source 1..25: mol_type = other DNA
tgccagcagtgaccaacaggcctca

SEQ ID NO: 36285 - DNA, 25 bp, synthetic construct
  misc_feature 1..25: note = Oligonucleotide
  source 1..25: mol_type = other DNA
tcatgccagcagtgaccaacaggcc

SEQ ID NO: 36286 - DNA, 25 bp, synthetic construct
  misc_feature 1..25: note = Oligonucleotide
  source 1..25: mol_type = other DNA
tgttcatgccagcagtgaccaacag

SEQ ID NO: 36287 - DNA, 25 bp, synthetic construct
  misc_feature 1..25: note = Oligonucleotide
  source 1..25: mol_type = other DNA
atgtgttcatgccagcagtgaccaa

SEQ ID NO: 36288 - DNA, 25 bp, synthetic construct
  misc_feature 1..25: note = Oligonucleotide
  source 1..25: mol_type = other DNA
ctgatgtgttcatgccagcagtgac

SEQ ID NO: 36289 - DNA, 25 bp, synthetic construct
  misc_feature 1..25: note = Oligonucleotide
  source 1..25: mol_type = other DNA
gttctgatgtgttcatgccagcagt

SEQ ID NO: 36290 - DNA, 25 bp, synthetic construct
  misc_feature 1..25: note = Oligonucleotide
  source 1..25: mol_type = other DNA
gcagttctgatgtgttcatgccagc

SEQ ID NO: 36291 - DNA, 25 bp, synthetic construct
  misc_feature 1..25: note = Oligonucleotide
  source 1..25: mol_type = other DNA
gaggcagttctgatgtgttcatgcc

SEQ ID NO: 36292 - DNA, 25 bp, synthetic construct
  misc_feature 1..25: note = Oligonucleotide
  source 1..25: mol_type = other DNA
tgtgaggcagttctgatgtgttcat

SEQ ID NO: 36293 - DNA, 25 bp, synthetic construct
  misc_feature 1..25: note = Oligonucleotide
  source 1..25: mol_type = other DNA
cagtgtgaggcagttctgatgtgtt

SEQ ID NO: 36294 - DNA, 25 bp, synthetic construct
  misc_feature 1..25: note = Oligonucleotide
  source 1..25: mol_type = other DNA
tgacagtgtgaggcagttctgatgt

SEQ ID NO: 36295 - DNA, 25 bp, synthetic construct
  misc_feature 1..25: note = Oligonucleotide
  source 1..25: mol_type = other DNA
tcttgacagtgtgaggcagttctga

SEQ ID NO: 36296 - DNA, 25 bp, synthetic construct
  misc_feature 1..25: note = Oligonucleotide
  source 1..25: mol_type = other DNA
agctcttgacagtgtgaggcagttc

SEQ ID NO: 36297 - DNA, 25 bp, synthetic construct
  misc_feature 1..25: note = Oligonucleotide
  source 1..25: mol_type = other DNA
aatagctcttgacagtgtgaggcag

SEQ ID NO: 36298 - DNA, 25 bp, synthetic construct
  misc_feature 1..25: note = Oligonucleotide
  source 1..25: mol_type = other DNA
tctaatagctcttgacagtgtgagg

SEQ ID NO: 36299 - DNA, 25 bp, synthetic construct
  misc_feature 1..25: note = Oligonucleotide
  source 1..25: mol_type = other DNA
ggctctaatagctcttgacagtgtg

SEQ ID NO: 36300 - DNA, 25 bp, synthetic construct
  misc_feature 1..25: note = Oligonucleotide
  source 1..25: mol_type = other DNA
aagggctctaatagctcttgacagt

SEQ ID NO: 36301 - DNA, 25 bp, synthetic construct
  misc_feature 1..25: note = Oligonucleotide
  source 1..25: mol_type = other DNA
ctaaagggctctaatagctcttgac

SEQ ID NO: 36302 - DNA, 25 bp, synthetic construct
  misc_feature 1..25: note = Oligonucleotide
  source 1..25: mol_type = other DNA
atcctaaagggctctaatagctctt

SEQ ID NO: 36303 - DNA, 25 bp, synthetic construct
  misc_feature 1..25: note = Oligonucleotide
  source 1..25: mol_type = other DNA
tggatcctaaagggctctaatagct

SEQ ID NO: 36304 - DNA, 25 bp, synthetic construct
  misc_feature 1..25: note = Oligonucleotide
  source 1..25: mol_type = other DNA
ctatggatcctaaagggctctaata

SEQ ID NO: 36305 - DNA, 25 bp, synthetic construct
  misc_feature 1..25: note = Oligonucleotide
  source 1..25: mol_type = other DNA
agactatggatcctaaagggctcta

SEQ ID NO: 36306 - DNA, 25 bp, synthetic construct
  misc_feature 1..25: note = Oligonucleotide
  source 1..25: mol_type = other DNA
gatagactatggatcctaaagggct

SEQ ID NO: 36307 - DNA, 25 bp, synthetic construct
  misc_feature 1..25: note = Oligonucleotide
  source 1..25: mol_type = other DNA
ctcgatagactatggatcctaaagg

SEQ ID NO: 36308 - DNA, 25 bp, synthetic construct
  misc_feature 1..25: note = Oligonucleotide
  source 1..25: mol_type = other DNA
cttctcgatagactatggatcctaa

SEQ ID NO: 36309 - DNA, 25 bp, synthetic construct
  misc_feature 1..25: note = Oligonucleotide
  source 1..25: mol_type = other DNA
caccttctcgatagactatggatcc

SEQ ID NO: 36310 - DNA, 25 bp, synthetic construct
  misc_feature 1..25: note = Oligonucleotide
  source 1..25: mol_type = other DNA
aggcaccttctcgatagactatgga

SEQ ID NO: 36311 - DNA, 25 bp, synthetic construct
  misc_feature 1..25: note = Oligonucleotide
  source 1..25: mol_type = other DNA
tccaggcaccttctcgatagactat

SEQ ID NO: 36312 - DNA, 25 bp, synthetic construct
  misc_feature 1..25: note = Oligonucleotide
  source 1..25: mol_type = other DNA
gtgtccaggcaccttctcgatagac

SEQ ID NO: 36313 - DNA, 25 bp, synthetic construct
  misc_feature 1..25: note = Oligonucleotide
  source 1..25: mol_type = other DNA
taggtgtccaggcaccttctcgata

SEQ ID NO: 36314 - DNA, 25 bp, synthetic construct
  misc_feature 1..25: note = Oligonucleotide
  source 1..25: mol_type = other DNA
ttttaggtgtccaggcaccttctcg

SEQ ID NO: 36315 - DNA, 25 bp, synthetic construct
  misc_feature 1..25: note = Oligonucleotide
  source 1..25: mol_type = other DNA
tctttttaggtgtccaggcaccttc

SEQ ID NO: 36316 - DNA, 25 bp, synthetic construct
  misc_feature 1..25: note = Oligonucleotide
  source 1..25: mol_type = other DNA
ttttctttttaggtgtccaggcacc

SEQ ID NO: 36317 - DNA, 25 bp, synthetic construct
  misc_feature 1..25: note = Oligonucleotide
  source 1..25: mol_type = other DNA
ttcttttctttttaggtgtccaggc

SEQ ID NO: 36318 - DNA, 25 bp, synthetic construct
  misc_feature 1..25: note = Oligonucleotide
  source 1..25: mol_type = other DNA
actttcttttctttttaggtgtcca

SEQ ID NO: 36319 - DNA, 25 bp, synthetic construct
  misc_feature 1..25: note = Oligonucleotide
  source 1..25: mol_type = other DNA
ctcactttcttttctttttaggtgt

SEQ ID NO: 36320 - DNA, 25 bp, synthetic construct
  misc_feature 1..25: note = Oligonucleotide
  source 1..25: mol_type = other DNA
cacctcactttcttttctttttagg

SEQ ID NO: 36321 - DNA, 25 bp, synthetic construct
  misc_feature 1..25: note = Oligonucleotide
  source 1..25: mol_type = other DNA
tgacacctcactttcttttcttttt

SEQ ID NO: 36322 - DNA, 25 bp, synthetic construct
  misc_feature 1..25: note = Oligonucleotide
  source 1..25: mol_type = other DNA
ctctgacacctcactttcttttctt

SEQ ID NO: 36323 - DNA, 25 bp, synthetic construct
  misc_feature 1..25: note = Oligonucleotide
  source 1..25: mol_type = other DNA
tttctctgacacctcactttctttt

SEQ ID NO: 36324 - DNA, 25 bp, synthetic construct
  misc_feature 1..25: note = Oligonucleotide
  source 1..25: mol_type = other DNA
tgctttctctgacacctcactttct

SEQ ID NO: 36325 - DNA, 25 bp, synthetic construct
  misc_feature 1..25: note = Oligonucleotide
  source 1..25: mol_type = other DNA
acctgctttctctgacacctcactt

SEQ ID NO: 36326 - DNA, 25 bp, synthetic construct
  misc_feature 1..25: note = Oligonucleotide
  source 1..25: mol_type = other DNA
tgcacctgctttctctgacacctca

SEQ ID NO: 36327 - DNA, 25 bp, synthetic construct
  misc_feature 1..25: note = Oligonucleotide
  source 1..25: mol_type = other DNA
acttgcacctgctttctctgacacc

SEQ ID NO: 36328 - DNA, 25 bp, synthetic construct
  misc_feature 1..25: note = Oligonucleotide
  source 1..25: mol_type = other DNA
ccgacttgcacctgctttctctgac

SEQ ID NO: 36329 - DNA, 25 bp, synthetic construct
  misc_feature 1..25: note = Oligonucleotide
  source 1..25: mol_type = other DNA
cctccgacttgcacctgctttctct

SEQ ID NO: 36330 - DNA, 25 bp, synthetic construct
  misc_feature 1..25: note = Oligonucleotide
  source 1..25: mol_type = other DNA
gagcctccgacttgcacctgctttc

SEQ ID NO: 36331 - DNA, 25 bp, synthetic construct
  misc_feature 1..25: note = Oligonucleotide
  source 1..25: mol_type = other DNA
caggagcctccgacttgcacctgct

SEQ ID NO: 36332 - DNA, 25 bp, synthetic construct
  misc_feature 1..25: note = Oligonucleotide
  source 1..25: mol_type = other DNA
ggacaggagcctccgacttgcacct

SEQ ID NO: 36333 - DNA, 25 bp, synthetic construct
  misc_feature 1..25: note = Oligonucleotide
  source 1..25: mol_type = other DNA
cctggacaggagcctccgacttgca

SEQ ID NO: 36334 - DNA, 25 bp, synthetic construct
  misc_feature 1..25: note = Oligonucleotide
  source 1..25: mol_type = other DNA
ccacctggacaggagcctccgactt

SEQ ID NO: 36335 - DNA, 25 bp, synthetic construct
  misc_feature 1..25: note = Oligonucleotide
  source 1..25: mol_type = other DNA
cagccacctggacaggagcctccga

SEQ ID NO: 36336 - DNA, 25 bp, synthetic construct
  misc_feature 1..25: note = Oligonucleotide
  source 1..25: mol_type = other DNA
aaacagccacctggacaggagcctc

SEQ ID NO: 36337 - DNA, 25 bp, synthetic construct
  misc_feature 1..25: note = Oligonucleotide
  source 1..25: mol_type = other DNA
agcaaacagccacctggacaggagc

SEQ ID NO: 36338 - DNA, 25 bp, synthetic construct
  misc_feature 1..25: note = Oligonucleotide
  source 1..25: mol_type = other DNA
agcagcaaacagccacctggacagg

SEQ ID NO: 36339 - DNA, 25 bp, synthetic construct
  misc_feature 1..25: note = Oligonucleotide
  source 1..25: mol_type = other DNA
ccgagcagcaaacagccacctggac

SEQ ID NO: 36340 - DNA, 25 bp, synthetic construct
  misc_feature 1..25: note = Oligonucleotide
  source 1..25: mol_type = other DNA
cctccgagcagcaaacagccacctg

SEQ ID NO: 36341 - DNA, 25 bp, synthetic construct
  misc_feature 1..25: note = Oligonucleotide
  source 1..25: mol_type = other DNA
catcctccgagcagcaaacagccac

SEQ ID NO: 36342 - DNA, 25 bp, synthetic construct
  misc_feature 1..25: note = Oligonucleotide
  source 1..25: mol_type = other DNA
ccacatcctccgagcagcaaacagc

SEQ ID NO: 36343 - DNA, 25 bp, synthetic construct
  misc_feature 1..25: note = Oligonucleotide
  source 1..25: mol_type = other DNA
ctcccacatcctccgagcagcaaac

SEQ ID NO: 36344 - DNA, 25 bp, synthetic construct
  misc_feature 1..25: note = Oligonucleotide
  source 1..25: mol_type = other DNA
cctctcccacatcctccgagcagca

SEQ ID NO: 36345 - DNA, 25 bp, synthetic construct
  misc_feature 1..25: note = Oligonucleotide
  source 1..25: mol_type = other DNA
atgcctctcccacatcctccgagca

SEQ ID NO: 36346 - DNA, 25 bp, synthetic construct
  misc_feature 1..25: note = Oligonucleotide
  source 1..25: mol_type = other DNA
gccatgcctctcccacatcctccga

SEQ ID NO: 36347 - DNA, 25 bp, synthetic construct
  misc_feature 1..25: note = Oligonucleotide
  source 1..25: mol_type = other DNA
agggccatgcctctcccacatcctc

SEQ ID NO: 36348 - DNA, 25 bp, synthetic construct
  misc_feature 1..25: note = Oligonucleotide
  source 1..25: mol_type = other DNA
aacagggccatgcctctcccacatc

SEQ ID NO: 36349 - DNA, 25 bp, synthetic construct
  misc_feature 1..25: note = Oligonucleotide
  source 1..25: mol_type = other DNA
tccaacagggccatgcctctcccac

SEQ ID NO: 36350 - DNA, 25 bp, synthetic construct
  misc_feature 1..25: note = Oligonucleotide
  source 1..25: mol_type = other DNA
tcctccaacagggccatgcctctcc

SEQ ID NO: 36351 - DNA, 25 bp, synthetic construct
  misc_feature 1..25: note = Oligonucleotide
  source 1..25: mol_type = other DNA
ccttcctccaacagggccatgcctc

SEQ ID NO: 36352 - DNA, 25 bp, synthetic construct
  misc_feature 1..25: note = Oligonucleotide
  source 1..25: mol_type = other DNA
tccccttcctccaacagggccatgc

SEQ ID NO: 36353 - DNA, 25 bp, synthetic construct
  misc_feature 1..25: note = Oligonucleotide
  source 1..25: mol_type = other DNA
ccctccccttcctccaacagggcca

SEQ ID NO: 36354 - DNA, 25 bp, synthetic construct
  misc_feature 1..25: note = Oligonucleotide
  source 1..25: mol_type = other DNA
cttccctccccttcctccaacaggg

SEQ ID NO: 36355 - DNA, 25 bp, synthetic construct
  misc_feature 1..25: note = Oligonucleotide
  source 1..25: mol_type = other DNA
ccccttccctccccttcctccaaca

SEQ ID NO: 36356 - DNA, 25 bp, synthetic construct
  misc_feature 1..25: note = Oligonucleotide
  source 1..25: mol_type = other DNA
ataccccttccctccccttcctcca

SEQ ID NO: 36357 - DNA, 25 bp, synthetic construct
  misc_feature 1..25: note = Oligonucleotide
  source 1..25: mol_type = other DNA
aggataccccttccctccccttcct

SEQ ID NO: 36358 - DNA, 25 bp, synthetic construct
  misc_feature 1..25: note = Oligonucleotide
  source 1..25: mol_type = other DNA
cacaggataccccttccctcccctt

SEQ ID NO: 36359 - DNA, 25 bp, synthetic construct
  misc_feature 1..25: note = Oligonucleotide
  source 1..25: mol_type = other DNA
ccccacaggataccccttccctccc

SEQ ID NO: 36360 - DNA, 25 bp, synthetic construct
  misc_feature 1..25: note = Oligonucleotide
  source 1..25: mol_type = other DNA
ttcccccacaggataccccttccct

SEQ ID NO: 36361 - DNA, 25 bp, synthetic construct
  misc_feature 1..25: note = Oligonucleotide
  source 1..25: mol_type = other DNA
ccattcccccacaggataccccttc

SEQ ID NO: 36362 - DNA, 25 bp, synthetic construct
  misc_feature 1..25: note = Oligonucleotide
  source 1..25: mol_type = other DNA
accccattcccccacaggatacccc

SEQ ID NO: 36363 - DNA, 25 bp, synthetic construct
  misc_feature 1..25: note = Oligonucleotide
  source 1..25: mol_type = other DNA
ctcaccccattcccccacaggatac

SEQ ID NO: 36364 - DNA, 25 bp, synthetic construct
  misc_feature 1..25: note = Oligonucleotide
  source 1..25: mol_type = other DNA
ttgctcaccccattcccccacagga

SEQ ID NO: 36365 - DNA, 25 bp, synthetic construct
  misc_feature 1..25: note = Oligonucleotide
  source 1..25: mol_type = other DNA
cctttgctcaccccattcccccaca

SEQ ID NO: 36366 - DNA, 25 bp, synthetic construct
  misc_feature 1..25: note = Oligonucleotide
  source 1..25: mol_type = other DNA
cagcctttgctcaccccattccccc

SEQ ID NO: 36367 - DNA, 25 bp, synthetic construct
  misc_feature 1..25: note = Oligonucleotide
  source 1..25: mol_type = other DNA
caccagcctttgctcaccccattcc

SEQ ID NO: 36368 - DNA, 25 bp, synthetic construct
  misc_feature 1..25: note = Oligonucleotide
  source 1..25: mol_type = other DNA
aggcaccagcctttgctcaccccat

SEQ ID NO: 36369 - DNA, 25 bp, synthetic construct
  misc_feature 1..25: note = Oligonucleotide
  source 1..25: mol_type = other DNA
tccaggcaccagcctttgctcaccc

SEQ ID NO: 36370 - DNA, 25 bp, synthetic construct
  misc_feature 1..25: note = Oligonucleotide
  source 1..25: mol_type = other DNA
ttttccaggcaccagcctttgctca

SEQ ID NO: 36371 - DNA, 25 bp, synthetic construct
  misc_feature 1..25: note = Oligonucleotide
  source 1..25: mol_type = other DNA
ccattttccaggcaccagcctttgc

SEQ ID NO: 36372 - DNA, 25 bp, synthetic construct
  misc_feature 1..25: note = Oligonucleotide
  source 1..25: mol_type = other DNA
cctccattttccaggcaccagcctt

SEQ ID NO: 36373 - DNA, 25 bp, synthetic construct
  misc_feature 1..25: note = Oligonucleotide
  source 1..25: mol_type = other DNA
aaccctccattttccaggcaccagc

SEQ ID NO: 36374 - DNA, 25 bp, synthetic construct
  misc_feature 1..25: note = Oligonucleotide
  source 1..25: mol_type = other DNA
tgcaaccctccattttccaggcacc

SEQ ID NO: 36375 - DNA, 25 bp, synthetic construct
  misc_feature 1..25: note = Oligonucleotide
  source 1..25: mol_type = other DNA
ctctgcaaccctccattttccaggc

SEQ ID NO: 36376 - DNA, 25 bp, synthetic construct
  misc_feature 1..25: note = Oligonucleotide
  source 1..25: mol_type = other DNA
cagctctgcaaccctccattttcca

SEQ ID NO: 36377 - DNA, 25 bp, synthetic construct
  misc_feature 1..25: note = Oligonucleotide
  source 1..25: mol_type = other DNA
tcccagctctgcaaccctccatttt

SEQ ID NO: 36378 - DNA, 25 bp, synthetic construct
  misc_feature 1..25: note = Oligonucleotide
  source 1..25: mol_type = other DNA
cactcccagctctgcaaccctccat

SEQ ID NO: 36379 - DNA, 25 bp, synthetic construct
  misc_feature 1..25: note = Oligonucleotide
  source 1..25: mol_type = other DNA
tctcactcccagctctgcaaccctc

SEQ ID NO: 36380 - DNA, 25 bp, synthetic construct
  misc_feature 1..25: note = Oligonucleotide
  source 1..25: mol_type = other DNA
tcctctcactcccagctctgcaacc

SEQ ID NO: 36381 - DNA, 25 bp, synthetic construct
  misc_feature 1..25: note = Oligonucleotide
  source 1..25: mol_type = other DNA
ccttcctctcactcccagctctgca

SEQ ID NO: 36382 - DNA, 25 bp, synthetic construct
  misc_feature 1..25: note = Oligonucleotide
  source 1..25: mol_type = other DNA
gccccttcctctcactcccagctct

SEQ ID NO: 36383 - DNA, 25 bp, synthetic construct
  misc_feature 1..25: note = Oligonucleotide
  source 1..25: mol_type = other DNA
ccagccccttcctctcactcccagc

SEQ ID NO: 36384 - DNA, 25 bp, synthetic construct
  misc_feature 1..25: note = Oligonucleotide
  source 1..25: mol_type = other DNA
cacccagccccttcctctcactccc

SEQ ID NO: 36385 - DNA, 25 bp, synthetic construct
  misc_feature 1..25: note = Oligonucleotide
  source 1..25: mol_type = other DNA
ccccacccagccccttcctctcact

SEQ ID NO: 36386 - DNA, 25 bp, synthetic construct
  misc_feature 1..25: note = Oligonucleotide
  source 1..25: mol_type = other DNA
ggtccccacccagccccttcctctc

SEQ ID NO: 36387 - DNA, 25 bp, synthetic construct
  misc_feature 1..25: note = Oligonucleotide
  source 1..25: mol_type = other DNA
gagggtccccacccagccccttcct

SEQ ID NO: 36388 - DNA, 25 bp, synthetic construct
  misc_feature 1..25: note = Oligonucleotide
  source 1..25: mol_type = other DNA
caggagggtccccacccagcccctt

SEQ ID NO: 36389 - DNA, 25 bp, synthetic construct
  misc_feature 1..25: note = Oligonucleotide
  source 1..25: mol_type = other DNA
tctcaggagggtccccacccagccc

SEQ ID NO: 36390 - DNA, 25 bp, synthetic construct
  misc_feature 1..25: note = Oligonucleotide
  source 1..25: mol_type = other DNA
ctatctcaggagggtccccacccag

SEQ ID NO: 36391 - DNA, 25 bp, synthetic construct
  misc_feature 1..25: note = Oligonucleotide
  source 1..25: mol_type = other DNA
cacctatctcaggagggtccccacc

SEQ ID NO: 36392 - DNA, 25 bp, synthetic construct
  misc_feature 1..25: note = Oligonucleotide
  source 1..25: mol_type = other DNA
caccacctatctcaggagggtcccc

SEQ ID NO: 36393 - DNA, 25 bp, synthetic construct
  misc_feature 1..25: note = Oligonucleotide
  source 1..25: mol_type = other DNA
tctcaccacctatctcaggagggtc

SEQ ID NO: 36394 - DNA, 25 bp, synthetic construct
  misc_feature 1..25: note = Oligonucleotide
  source 1..25: mol_type = other DNA
ctctctcaccacctatctcaggagg

SEQ ID NO: 36395 - DNA, 25 bp, synthetic construct
  misc_feature 1..25: note = Oligonucleotide
  source 1..25: mol_type = other DNA
tctctctctcaccacctatctcagg

SEQ ID NO: 36396 - DNA, 25 bp, synthetic construct
  misc_feature 1..25: note = Oligonucleotide
  source 1..25: mol_type = other DNA
tcttctctctctcaccacctatctc

SEQ ID NO: 36397 - DNA, 25 bp, synthetic construct
  misc_feature 1..25: note = Oligonucleotide
  source 1..25: mol_type = other DNA
ccctcttctctctctcaccacctat

SEQ ID NO: 36398 - DNA, 25 bp, synthetic construct
  misc_feature 1..25: note = Oligonucleotide
  source 1..25: mol_type = other DNA
ctgccctcttctctctctcaccacc

SEQ ID NO: 36399 - DNA, 25 bp, synthetic construct
  misc_feature 1..25: note = Oligonucleotide
  source 1..25: mol_type = other DNA
gttctgccctcttctctctctcacc

SEQ ID NO: 36400 - DNA, 25 bp, synthetic construct
  misc_feature 1..25: note = Oligonucleotide
  source 1..25: mol_type = other DNA
ggtgttctgccctcttctctctctc

SEQ ID NO: 36401 - DNA, 25 bp, synthetic construct
  misc_feature 1..25: note = Oligonucleotide
  source 1..25: mol_type = other DNA
aggggtgttctgccctcttctctct

SEQ ID NO: 36402 - DNA, 25 bp, synthetic construct
  misc_feature 1..25: note = Oligonucleotide
  source 1..25: mol_type = other DNA
aggaggggtgttctgccctcttctc

SEQ ID NO: 36403 - DNA, 25 bp, synthetic construct
  misc_feature 1..25: note = Oligonucleotide
  source 1..25: mol_type = other DNA
gggaggaggggtgttctgccctctt

SEQ ID NO: 36404 - DNA, 25 bp, synthetic construct
  misc_feature 1..25: note = Oligonucleotide
  source 1..25: mol_type = other DNA
gaggggaggaggggtgttctgccct

SEQ ID NO: 36405 - DNA, 25 bp, synthetic construct
  misc_feature 1..25: note = Oligonucleotide
  source 1..25: mol_type = other DNA
gctgaggggaggaggggtgttctgc

SEQ ID NO: 36406 - DNA, 25 bp, synthetic construct
  misc_feature 1..25: note = Oligonucleotide
  source 1..25: mol_type = other DNA
agtgctgaggggaggaggggtgttc

SEQ ID NO: 36407 - DNA, 25 bp, synthetic construct
  misc_feature 1..25: note = Oligonucleotide
  source 1..25: mol_type = other DNA
cccagtgctgaggggaggaggggtg

SEQ ID NO: 36408 - DNA, 25 bp, synthetic construct
  misc_feature 1..25: note = Oligonucleotide
  source 1..25: mol_type = other DNA
gcccccagtgctgaggggaggaggg

SEQ ID NO: 36409 - DNA, 25 bp, synthetic construct
  misc_feature 1..25: note = Oligonucleotide
  source 1..25: mol_type = other DNA
ggagcccccagtgctgaggggagga

SEQ ID NO: 36410 - DNA, 25 bp, synthetic construct
  misc_feature 1..25: note = Oligonucleotide
  source 1..25: mol_type = other DNA
tgaggagcccccagtgctgagggga

SEQ ID NO: 36411 - DNA, 25 bp, synthetic construct
  misc_feature 1..25: note = Oligonucleotide
  source 1..25: mol_type = other DNA
ccatgaggagcccccagtgctgagg

SEQ ID NO: 36412 - DNA, 25 bp, synthetic construct
  misc_feature 1..25: note = Oligonucleotide
  source 1..25: mol_type = other DNA
cgaccatgaggagcccccagtgctg

SEQ ID NO: 36413 - DNA, 25 bp, synthetic construct
  misc_feature 1..25: note = Oligonucleotide
  source 1..25: mol_type = other DNA
tggcgaccatgaggagcccccagtg

SEQ ID NO: 36414 - DNA, 25 bp, synthetic construct
  misc_feature 1..25: note = Oligonucleotide
  source 1..25: mol_type = other DNA
atgtggcgaccatgaggagccccca

SEQ ID NO: 36415 - DNA, 25 bp, synthetic construct
  misc_feature 1..25: note = Oligonucleotide
  source 1..25: mol_type = other DNA
tgcatgtggcgaccatgaggagccc

SEQ ID NO: 36416 - DNA, 25 bp, synthetic construct
  misc_feature 1..25: note = Oligonucleotide
  source 1..25: mol_type = other DNA
acatgcatgtggcgaccatgaggag

SEQ ID NO: 36417 - DNA, 25 bp, synthetic construct
  misc_feature 1..25: note = Oligonucleotide
  source 1..25: mol_type = other DNA
cagacatgcatgtggcgaccatgag

SEQ ID NO: 36418 - DNA, 25 bp, synthetic construct
  misc_feature 1..25: note = Oligonucleotide
  source 1..25: mol_type = other DNA
gagcagacatgcatgtggcgaccat

SEQ ID NO: 36419 - DNA, 25 bp, synthetic construct
  misc_feature 1..25: note = Oligonucleotide
  source 1..25: mol_type = other DNA
accgagcagacatgcatgtggcgac

SEQ ID NO: 36420 - DNA, 25 bp, synthetic construct
  misc_feature 1..25: note = Oligonucleotide
  source 1..25: mol_type = other DNA
caaaccgagcagacatgcatgtggc

SEQ ID NO: 36421 - DNA, 25 bp, synthetic construct
  misc_feature 1..25: note = Oligonucleotide
  source 1..25: mol_type = other DNA
gtacaaaccgagcagacatgcatgt

SEQ ID NO: 36422 - DNA, 25 bp, synthetic construct
  misc_feature 1..25: note = Oligonucleotide
  source 1..25: mol_type = other DNA
ctggtacaaaccgagcagacatgca

SEQ ID NO: 36423 - DNA, 25 bp, synthetic construct
  misc_feature 1..25: note = Oligonucleotide
  source 1..25: mol_type = other DNA
ttcctggtacaaaccgagcagacat

SEQ ID NO: 36424 - DNA, 25 bp, synthetic construct
  misc_feature 1..25: note = Oligonucleotide
  source 1..25: mol_type = other DNA
acattcctggtacaaaccgagcaga

SEQ ID NO: 36425 - DNA, 25 bp, synthetic construct
  misc_feature 1..25: note = Oligonucleotide
  source 1..25: mol_type = other DNA
agcacattcctggtacaaaccgagc

SEQ ID NO: 36426 - DNA, 25 bp, synthetic construct
  misc_feature 1..25: note = Oligonucleotide
  source 1..25: mol_type = other DNA
cccagcacattcctggtacaaaccg

SEQ ID NO: 36427 - DNA, 25 bp, synthetic construct
  misc_feature 1..25: note = Oligonucleotide
  source 1..25: mol_type = other DNA
ggccccagcacattcctggtacaaa

SEQ ID NO: 36428 - DNA, 25 bp, synthetic construct
  misc_feature 1..25: note = Oligonucleotide
  source 1..25: mol_type = other DNA
tgtggccccagcacattcctggtac

SEQ ID NO: 36429 - DNA, 25 bp, synthetic construct
  misc_feature 1..25: note = Oligonucleotide
  source 1..25: mol_type = other DNA
acctgtggccccagcacattcctgg

SEQ ID NO: 36430 - DNA, 25 bp, synthetic construct
  misc_feature 1..25: note = Oligonucleotide
  source 1..25: mol_type = other DNA
ctgacctgtggccccagcacattcc

SEQ ID NO: 36431 - DNA, 25 bp, synthetic construct
  misc_feature 1..25: note = Oligonucleotide
  source 1..25: mol_type = other DNA
ccactgacctgtggccccagcacat

SEQ ID NO: 36432 - DNA, 25 bp, synthetic construct
  misc_feature 1..25: note = Oligonucleotide
  source 1..25: mol_type = other DNA
tctccactgacctgtggccccagca

SEQ ID NO: 36433 - DNA, 25 bp, synthetic construct
  misc_feature 1..25: note = Oligonucleotide
  source 1..25: mol_type = other DNA
gggtctccactgacctgtggcccca

SEQ ID NO: 36434 - DNA, 25 bp, synthetic construct
  misc_feature 1..25: note = Oligonucleotide
  source 1..25: mol_type = other DNA
cctgggtctccactgacctgtggcc

SEQ ID NO: 36435 - DNA, 25 bp, synthetic construct
  misc_feature 1..25: note = Oligonucleotide
  source 1..25: mol_type = other DNA
tggcctgggtctccactgacctgtg

SEQ ID NO: 36436 - DNA, 25 bp, synthetic construct
  misc_feature 1..25: note = Oligonucleotide
  source 1..25: mol_type = other DNA
ccctggcctgggtctccactgacct

SEQ ID NO: 36437 - DNA, 25 bp, synthetic construct
  misc_feature 1..25: note = Oligonucleotide
  source 1..25: mol_type = other DNA
cttccctggcctgggtctccactga

SEQ ID NO: 36438 - DNA, 25 bp, synthetic construct
  misc_feature 1..25: note = Oligonucleotide
  source 1..25: mol_type = other DNA
ggccttccctggcctgggtctccac

SEQ ID NO: 36439 - DNA, 25 bp, synthetic construct
  misc_feature 1..25: note = Oligonucleotide
  source 1..25: mol_type = other DNA
cagggccttccctggcctgggtctc

SEQ ID NO: 36440 - DNA, 25 bp, synthetic construct
  misc_feature 1..25: note = Oligonucleotide
  source 1..25: mol_type = other DNA
ccacagggccttccctggcctgggt

SEQ ID NO: 36441 - DNA, 25 bp, synthetic construct
  misc_feature 1..25: note = Oligonucleotide
  source 1..25: mol_type = other DNA
ccgccacagggccttccctggcctg

SEQ ID NO: 36442 - DNA, 25 bp, synthetic construct
  misc_feature 1..25: note = Oligonucleotide
  source 1..25: mol_type = other DNA
gacccgccacagggccttccctggc

SEQ ID NO: 36443 - DNA, 25 bp, synthetic construct
  misc_feature 1..25: note = Oligonucleotide
  source 1..25: mol_type = other DNA
ttggacccgccacagggccttccct

SEQ ID NO: 36444 - DNA, 25 bp, synthetic construct
  misc_feature 1..25: note = Oligonucleotide
  source 1..25: mol_type = other DNA
ggcttggacccgccacagggccttc

SEQ ID NO: 36445 - DNA, 25 bp, synthetic construct
  misc_feature 1..25: note = Oligonucleotide
  source 1..25: mol_type = other DNA
aagggcttggacccgccacagggcc

SEQ ID NO: 36446 - DNA, 25 bp, synthetic construct
  misc_feature 1..25: note = Oligonucleotide
  source 1..25: mol_type = other DNA
aggaagggcttggacccgccacagg

SEQ ID NO: 36447 - DNA, 25 bp, synthetic construct
  misc_feature 1..25: note = Oligonucleotide
  source 1..25: mol_type = other DNA
cacaggaagggcttggacccgccac

SEQ ID NO: 36448 - DNA, 25 bp, synthetic construct
  misc_feature 1..25: note = Oligonucleotide
  source 1..25: mol_type = other DNA
atacacaggaagggcttggacccgc

SEQ ID NO: 36449 - DNA, 25 bp, synthetic construct
  misc_feature 1..25: note = Oligonucleotide
  source 1..25: mol_type = other DNA
tgaatacacaggaagggcttggacc

SEQ ID NO: 36450 - DNA, 25 bp, synthetic construct
  misc_feature 1..25: note = Oligonucleotide
  source 1..25: mol_type = other DNA
acgtgaatacacaggaagggcttgg

SEQ ID NO: 36451 - DNA, 25 bp, synthetic construct
  misc_feature 1..25: note = Oligonucleotide
  source 1..25: mol_type = other DNA
ggaacgtgaatacacaggaagggct

SEQ ID NO: 36452 - DNA, 25 bp, synthetic construct
  misc_feature 1..25: note = Oligonucleotide
  source 1..25: mol_type = other DNA
ccgggaacgtgaatacacaggaagg

SEQ ID NO: 36453 - DNA, 25 bp, synthetic construct
  misc_feature 1..25: note = Oligonucleotide
  source 1..25: mol_type = other DNA
ctcccgggaacgtgaatacacagga

SEQ ID NO: 36454 - DNA, 25 bp, synthetic construct
  misc_feature 1..25: note = Oligonucleotide
  source 1..25: mol_type = other DNA
gttctcccgggaacgtgaatacaca

SEQ ID NO: 36455 - DNA, 25 bp, synthetic construct
  misc_feature 1..25: note = Oligonucleotide
  source 1..25: mol_type = other DNA
agagttctcccgggaacgtgaatac

SEQ ID NO: 36456 - DNA, 25 bp, synthetic construct
  misc_feature 1..25: note = Oligonucleotide
  source 1..25: mol_type = other DNA
tccagagttctcccgggaacgtgaa

SEQ ID NO: 36457 - DNA, 25 bp, synthetic construct
  misc_feature 1..25: note = Oligonucleotide
  source 1..25: mol_type = other DNA
aagtccagagttctcccgggaacgt

SEQ ID NO: 36458 - DNA, 25 bp, synthetic construct
  misc_feature 1..25: note = Oligonucleotide
  source 1..25: mol_type = other DNA
gggaagtccagagttctcccgggaa

SEQ ID NO: 36459 - DNA, 25 bp, synthetic construct
  misc_feature 1..25: note = Oligonucleotide
  source 1..25: mol_type = other DNA
acagggaagtccagagttctcccgg

SEQ ID NO: 36460 - DNA, 25 bp, synthetic construct
  misc_feature 1..25: note = Oligonucleotide
  source 1..25: mol_type = other DNA
attacagggaagtccagagttctcc

SEQ ID NO: 36461 - DNA, 25 bp, synthetic construct
  misc_feature 1..25: note = Oligonucleotide
  source 1..25: mol_type = other DNA
gaaattacagggaagtccagagttc

SEQ ID NO: 36462 - DNA, 25 bp, synthetic construct
  misc_feature 1..25: note = Oligonucleotide
  source 1..25: mol_type = other DNA
ccagaaattacagggaagtccagag

SEQ ID NO: 36463 - DNA, 25 bp, synthetic construct
  misc_feature 1..25: note = Oligonucleotide
  source 1..25: mol_type = other DNA
ggcccagaaattacagggaagtcca

SEQ ID NO: 36464 - DNA, 25 bp, synthetic construct
  misc_feature 1..25: note = Oligonucleotide
  source 1..25: mol_type = other DNA
aggggcccagaaattacagggaagt

SEQ ID NO: 36465 - DNA, 25 bp, synthetic construct
  misc_feature 1..25: note = Oligonucleotide
  source 1..25: mol_type = other DNA
aaaaggggcccagaaattacaggga

SEQ ID NO: 36466 - DNA, 25 bp, synthetic construct
  misc_feature 1..25: note = Oligonucleotide
  source 1..25: mol_type = other DNA
agaaaaaggggcccagaaattacag

SEQ ID NO: 36467 - DNA, 25 bp, synthetic construct
  misc_feature 1..25: note = Oligonucleotide
  source 1..25: mol_type = other DNA
aaaagaaaaaggggcccagaaatta

SEQ ID NO: 36468 - DNA, 25 bp, synthetic construct
  misc_feature 1..25: note = Oligonucleotide
  source 1..25: mol_type = other DNA
cacaaaagaaaaaggggcccagaaa

SEQ ID NO: 36469 - DNA, 25 bp, synthetic construct
  misc_feature 1..25: note = Oligonucleotide
  source 1..25: mol_type = other DNA
catcacaaaagaaaaaggggcccag

SEQ ID NO: 36470 - DNA, 25 bp, synthetic construct
  misc_feature 1..25: note = Oligonucleotide
  source 1..25: mol_type = other DNA
tctcatcacaaaagaaaaaggggcc

SEQ ID NO: 36471 - DNA, 25 bp, synthetic construct
  misc_feature 1..25: note = Oligonucleotide
  source 1..25: mol_type = other DNA
tgttctcatcacaaaagaaaaaggg

SEQ ID NO: 36472 - DNA, 25 bp, synthetic construct
  misc_feature 1..25: note = Oligonucleotide
  source 1..25: mol_type = other DNA
tgatgttctcatcacaaaagaaaaa

SEQ ID NO: 36473 - DNA, 25 bp, synthetic construct
  misc_feature 1..25: note = Oligonucleotide
  source 1..25: mol_type = other DNA
ccctgatgttctcatcacaaaagaa

SEQ ID NO: 36474 - DNA, 25 bp, synthetic construct
  misc_feature 1..25: note = Oligonucleotide
  source 1..25: mol_type = other DNA
ctaccctgatgttctcatcacaaaa

SEQ ID NO: 36475 - DNA, 25 bp, synthetic construct
  misc_feature 1..25: note = Oligonucleotide
  source 1..25: mol_type = other DNA
cacctaccctgatgttctcatcaca

SEQ ID NO: 36476 - DNA, 25 bp, synthetic construct
  misc_feature 1..25: note = Oligonucleotide
  source 1..25: mol_type = other DNA
tggcacctaccctgatgttctcatc

SEQ ID NO: 36477 - DNA, 25 bp, synthetic construct
  misc_feature 1..25: note = Oligonucleotide
  source 1..25: mol_type = other DNA
gtgtggcacctaccctgatgttctc

SEQ ID NO: 36478 - DNA, 25 bp, synthetic construct
  misc_feature 1..25: note = Oligonucleotide
  source 1..25: mol_type = other DNA
tgggtgtggcacctaccctgatgtt

SEQ ID NO: 36479 - DNA, 25 bp, synthetic construct
  misc_feature 1..25: note = Oligonucleotide
  source 1..25: mol_type = other DNA
tgctgggtgtggcacctaccctgat

SEQ ID NO: 36480 - DNA, 25 bp, synthetic construct
  misc_feature 1..25: note = Oligonucleotide
  source 1..25: mol_type = other DNA
agatgctgggtgtggcacctaccct

SEQ ID NO: 36481 - DNA, 25 bp, synthetic construct
  misc_feature 1..25: note = Oligonucleotide
  source 1..25: mol_type = other DNA
catagatgctgggtgtggcacctac

SEQ ID NO: 36482 - DNA, 25 bp, synthetic construct
  misc_feature 1..25: note = Oligonucleotide
  source 1..25: mol_type = other DNA
tcacatagatgctgggtgtggcacc

SEQ ID NO: 36483 - DNA, 25 bp, synthetic construct
  misc_feature 1..25: note = Oligonucleotide
  source 1..25: mol_type = other DNA
cactcacatagatgctgggtgtggc

SEQ ID NO: 36484 - DNA, 25 bp, synthetic construct
  misc_feature 1..25: note = Oligonucleotide
  source 1..25: mol_type = other DNA
ggccactcacatagatgctgggtgt

SEQ ID NO: 36485 - DNA, 25 bp, synthetic construct
  misc_feature 1..25: note = Oligonucleotide
  source 1..25: mol_type = other DNA
caaggccactcacatagatgctggg

SEQ ID NO: 36486 - DNA, 25 bp, synthetic construct
  misc_feature 1..25: note = Oligonucleotide
  source 1..25: mol_type = other DNA
ggacaaggccactcacatagatgct

SEQ ID NO: 36487 - DNA, 25 bp, synthetic construct
  misc_feature 1..25: note = Oligonucleotide
  source 1..25: mol_type = other DNA
ccaggacaaggccactcacatagat

SEQ ID NO: 36488 - DNA, 25 bp, synthetic construct
  misc_feature 1..25: note = Oligonucleotide
  source 1..25: mol_type = other DNA
tttccaggacaaggccactcacata

SEQ ID NO: 36489 - DNA, 25 bp, synthetic construct
  misc_feature 1..25: note = Oligonucleotide
  source 1..25: mol_type = other DNA
ccttttccaggacaaggccactcac

SEQ ID NO: 36490 - DNA, 25 bp, synthetic construct
  misc_feature 1..25: note = Oligonucleotide
  source 1..25: mol_type = other DNA
aaaccttttccaggacaaggccact

SEQ ID NO: 36491 - DNA, 25 bp, synthetic construct
  misc_feature 1..25: note = Oligonucleotide
  source 1..25: mol_type = other DNA
cagaaaccttttccaggacaaggcc

SEQ ID NO: 36492 - DNA, 25 bp, synthetic construct
  misc_feature 1..25: note = Oligonucleotide
  source 1..25: mol_type = other DNA
gcacagaaaccttttccaggacaag

SEQ ID NO: 36493 - DNA, 25 bp, synthetic construct
  misc_feature 1..25: note = Oligonucleotide
  source 1..25: mol_type = other DNA
ttggcacagaaaccttttccaggac

SEQ ID NO: 36494 - DNA, 25 bp, synthetic construct
  misc_feature 1..25: note = Oligonucleotide
  source 1..25: mol_type = other DNA
tgtttggcacagaaaccttttccag

SEQ ID NO: 36495 - DNA, 25 bp, synthetic construct
  misc_feature 1..25: note = Oligonucleotide
  source 1..25: mol_type = other DNA
gtgtgtttggcacagaaaccttttc

SEQ ID NO: 36496 - DNA, 25 bp, synthetic construct
  misc_feature 1..25: note = Oligonucleotide
  source 1..25: mol_type = other DNA
caagtgtgtttggcacagaaacctt

SEQ ID NO: 36497 - DNA, 25 bp, synthetic construct
  misc_feature 1..25: note = Oligonucleotide
  source 1..25: mol_type = other DNA
gggcaagtgtgtttggcacagaaac

SEQ ID NO: 36498 - DNA, 25 bp, synthetic construct
  misc_feature 1..25: note = Oligonucleotide
  source 1..25: mol_type = other DNA
gcagggcaagtgtgtttggcacaga

SEQ ID NO: 36499 - DNA, 25 bp, synthetic construct
  misc_feature 1..25: note = Oligonucleotide
  source 1..25: mol_type = other DNA
aaggcagggcaagtgtgtttggcac

SEQ ID NO: 36500 - DNA, 25 bp, synthetic construct
  misc_feature 1..25: note = Oligonucleotide
  source 1..25: mol_type = other DNA
taaaaggcagggcaagtgtgtttgg

SEQ ID NO: 36501 - DNA, 25 bp, synthetic construct
  misc_feature 1..25: note = Oligonucleotide
  source 1..25: mol_type = other DNA
tcttaaaaggcagggcaagtgtgtt

SEQ ID NO: 36502 - DNA, 25 bp, synthetic construct
  misc_feature 1..25: note = Oligonucleotide
  source 1..25: mol_type = other DNA
cggtcttaaaaggcagggcaagtgt

SEQ ID NO: 36503 - DNA, 25 bp, synthetic construct
  misc_feature 1..25: note = Oligonucleotide
  source 1..25: mol_type = other DNA
agtcggtcttaaaaggcagggcaag

SEQ ID NO: 36504 - DNA, 25 bp, synthetic construct
  misc_feature 1..25: note = Oligonucleotide
  source 1..25: mol_type = other DNA
caaagtcggtcttaaaaggcagggc

SEQ ID NO: 36505 - DNA, 25 bp, synthetic construct
  misc_feature 1..25: note = Oligonucleotide
  source 1..25: mol_type = other DNA
gttcaaagtcggtcttaaaaggcag

SEQ ID NO: 36506 - DNA, 25 bp, synthetic construct
  misc_feature 1..25: note = Oligonucleotide
  source 1..25: mol_type = other DNA
tctgttcaaagtcggtcttaaaagg

SEQ ID NO: 36507 - DNA, 25 bp, synthetic construct
  misc_feature 1..25: note = Oligonucleotide
  source 1..25: mol_type = other DNA
tgttctgttcaaagtcggtcttaaa

SEQ ID NO: 36508 - DNA, 25 bp, synthetic construct
  misc_feature 1..25: note = Oligonucleotide
  source 1..25: mol_type = other DNA
ctgtgttctgttcaaagtcggtctt

SEQ ID NO: 36509 - DNA, 25 bp, synthetic construct
  misc_feature 1..25: note = Oligonucleotide
  source 1..25: mol_type = other DNA
cctctgtgttctgttcaaagtcggt

SEQ ID NO: 36510 - DNA, 25 bp, synthetic construct
  misc_feature 1..25: note = Oligonucleotide
  source 1..25: mol_type = other DNA
tcacctctgtgttctgttcaaagtc

SEQ ID NO: 36511 - DNA, 25 bp, synthetic construct
  misc_feature 1..25: note = Oligonucleotide
  source 1..25: mol_type = other DNA
tggtcacctctgtgttctgttcaaa

SEQ ID NO: 36512 - DNA, 25 bp, synthetic construct
  misc_feature 1..25: note = Oligonucleotide
  source 1..25: mol_type = other DNA
aggtggtcacctctgtgttctgttc

SEQ ID NO: 36513 - DNA, 25 bp, synthetic construct
  misc_feature 1..25: note = Oligonucleotide
  source 1..25: mol_type = other DNA
ttaaggtggtcacctctgtgttctg

SEQ ID NO: 36514 - DNA, 25 bp, synthetic construct
  misc_feature 1..25: note = Oligonucleotide
  source 1..25: mol_type = other DNA
aaattaaggtggtcacctctgtgtt

SEQ ID NO: 36515 - DNA, 25 bp, synthetic construct
  misc_feature 1..25: note = Oligonucleotide
  source 1..25: mol_type = other DNA
tgaaaattaaggtggtcacctctgt

SEQ ID NO: 36516 - DNA, 25 bp, synthetic construct
  misc_feature 1..25: note = Oligonucleotide
  source 1..25: mol_type = other DNA
cgctgaaaattaaggtggtcacctc

SEQ ID NO: 36517 - DNA, 25 bp, synthetic construct
  misc_feature 1..25: note = Oligonucleotide
  source 1..25: mol_type = other DNA
tgtcgctgaaaattaaggtggtcac

SEQ ID NO: 36518 - DNA, 25 bp, synthetic construct
  misc_feature 1..25: note = Oligonucleotide
  source 1..25: mol_type = other DNA
aggtgtcgctgaaaattaaggtggt

SEQ ID NO: 36519 - DNA, 25 bp, synthetic construct
  misc_feature 1..25: note = Oligonucleotide
  source 1..25: mol_type = other DNA
ttcaggtgtcgctgaaaattaaggt

SEQ ID NO: 36520 - DNA, 25 bp, synthetic construct
  misc_feature 1..25: note = Oligonucleotide
  source 1..25: mol_type = other DNA
aagttcaggtgtcgctgaaaattaa

SEQ ID NO: 36521 - DNA, 25 bp, synthetic construct
  misc_feature 1..25: note = Oligonucleotide
  source 1..25: mol_type = other DNA
aacaagttcaggtgtcgctgaaaat

SEQ ID NO: 36522 - DNA, 25 bp, synthetic construct
  misc_feature 1..25: note = Oligonucleotide
  source 1..25: mol_type = other DNA
gaaaacaagttcaggtgtcgctgaa

SEQ ID NO: 36523 - DNA, 25 bp, synthetic construct
  misc_feature 1..25: note = Oligonucleotide
  source 1..25: mol_type = other DNA
atagaaaacaagttcaggtgtcgct

SEQ ID NO: 36524 - DNA, 25 bp, synthetic construct
  misc_feature 1..25: note = Oligonucleotide
  source 1..25: mol_type = other DNA
cccatagaaaacaagttcaggtgtc

SEQ ID NO: 36525 - DNA, 25 bp, synthetic construct
  misc_feature 1..25: note = Oligonucleotide
  source 1..25: mol_type = other DNA
aaccccatagaaaacaagttcaggt

SEQ ID NO: 36526 - DNA, 25 bp, synthetic construct
  misc_feature 1..25: note = Oligonucleotide
  source 1..25: mol_type = other DNA
caaaaccccatagaaaacaagttca

SEQ ID NO: 36527 - DNA, 25 bp, synthetic construct
  misc_feature 1..25: note = Oligonucleotide
  source 1..25: mol_type = other DNA
aggcaaaaccccatagaaaacaagt

SEQ ID NO: 36528 - DNA, 25 bp, synthetic construct
  misc_feature 1..25: note = Oligonucleotide
  source 1..25: mol_type = other DNA
aaaaggcaaaaccccatagaaaaca

SEQ ID NO: 36529 - DNA, 25 bp, synthetic construct
  misc_feature 1..25: note = Oligonucleotide
  source 1..25: mol_type = other DNA
gaaaaaaggcaaaaccccatagaaa

SEQ ID NO: 36530 - DNA, 25 bp, synthetic construct
  misc_feature 1..25: note = Oligonucleotide
  source 1..25: mol_type = other DNA
tcagaaaaaaggcaaaaccccatag

SEQ ID NO: 36531 - DNA, 25 bp, synthetic construct
  misc_feature 1..25: note = Oligonucleotide
  source 1..25: mol_type = other DNA
tgttcagaaaaaaggcaaaacccca

SEQ ID NO: 36532 - DNA, 25 bp, synthetic construct
  misc_feature 1..25: note = Oligonucleotide
  source 1..25: mol_type = other DNA
gtttgttcagaaaaaaggcaaaacc

SEQ ID NO: 36533 - DNA, 25 bp, synthetic construct
  misc_feature 1..25: note = Oligonucleotide
  source 1..25: mol_type = other DNA
aacgtttgttcagaaaaaaggcaaa

SEQ ID NO: 36534 - DNA, 25 bp, synthetic construct
  misc_feature 1..25: note = Oligonucleotide
  source 1..25: mol_type = other DNA
tcaaacgtttgttcagaaaaaaggc

SEQ ID NO: 36535 - DNA, 25 bp, synthetic construct
  misc_feature 1..25: note = Oligonucleotide
  source 1..25: mol_type = other DNA
cagtcaaacgtttgttcagaaaaaa

SEQ ID NO: 36536 - DNA, 25 bp, synthetic construct
  misc_feature 1..25: note = Oligonucleotide
  source 1..25: mol_type = other DNA
gctcagtcaaacgtttgttcagaaa

SEQ ID NO: 36537 - DNA, 25 bp, synthetic construct
  misc_feature 1..25: note = Oligonucleotide
  source 1..25: mol_type = other DNA
ttggctcagtcaaacgtttgttcag

SEQ ID NO: 36538 - DNA, 25 bp, synthetic construct
  misc_feature 1..25: note = Oligonucleotide
  source 1..25: mol_type = other DNA
tgcttggctcagtcaaacgtttgtt

SEQ ID NO: 36539 - DNA, 25 bp, synthetic construct
  misc_feature 1..25: note = Oligonucleotide
  source 1..25: mol_type = other DNA
tcatgcttggctcagtcaaacgttt

SEQ ID NO: 36540 - DNA, 25 bp, synthetic construct
  misc_feature 1..25: note = Oligonucleotide
  source 1..25: mol_type = other DNA
ccatcatgcttggctcagtcaaacg

SEQ ID NO: 36541 - DNA, 25 bp, synthetic construct
  misc_feature 1..25: note = Oligonucleotide
  source 1..25: mol_type = other DNA
actccatcatgcttggctcagtcaa

SEQ ID NO: 36542 - DNA, 25 bp, synthetic construct
  misc_feature 1..25: note = Oligonucleotide
  source 1..25: mol_type = other DNA
acaactccatcatgcttggctcagt

SEQ ID NO: 36543 - DNA, 25 bp, synthetic construct
  misc_feature 1..25: note = Oligonucleotide
  source 1..25: mol_type = other DNA
tgcacaactccatcatgcttggctc

SEQ ID NO: 36544 - DNA, 25 bp, synthetic construct
  misc_feature 1..25: note = Oligonucleotide
  source 1..25: mol_type = other DNA
atatgcacaactccatcatgcttgg

SEQ ID NO: 36545 - DNA, 25 bp, synthetic construct
  misc_feature 1..25: note = Oligonucleotide
  source 1..25: mol_type = other DNA
cagatatgcacaactccatcatgct

SEQ ID NO: 36546 - DNA, 25 bp, synthetic construct
  misc_feature 1..25: note = Oligonucleotide
  source 1..25: mol_type = other DNA
acacagatatgcacaactccatcat

SEQ ID NO: 36547 - DNA, 25 bp, synthetic construct
  misc_feature 1..25: note = Oligonucleotide
  source 1..25: mol_type = other DNA
cacacacagatatgcacaactccat

SEQ ID NO: 36548 - DNA, 25 bp, synthetic construct
  misc_feature 1..25: note = Oligonucleotide
  source 1..25: mol_type = other DNA
acacacacacagatatgcacaactc

SEQ ID NO: 36549 - DNA, 25 bp, synthetic construct
  misc_feature 1..25: note = Oligonucleotide
  source 1..25: mol_type = other DNA
cgcacacacacacagatatgcacaa

SEQ ID NO: 36550 - DNA, 25 bp, synthetic construct
  misc_feature 1..25: note = Oligonucleotide
  source 1..25: mol_type = other DNA
acacgcacacacacacagatatgca

SEQ ID NO: 36551 - DNA, 25 bp, synthetic construct
  misc_feature 1..25: note = Oligonucleotide
  source 1..25: mol_type = other DNA
cagacacgcacacacacacagatat

SEQ ID NO: 36552 - DNA, 25 bp, synthetic construct
  misc_feature 1..25: note = Oligonucleotide
  source 1..25: mol_type = other DNA
gcacagacacgcacacacacacaga

SEQ ID NO: 36553 - DNA, 25 bp, synthetic construct
  misc_feature 1..25: note = Oligonucleotide
  source 1..25: mol_type = other DNA
aacgcacagacacgcacacacacac

SEQ ID NO: 36554 - DNA, 25 bp, synthetic construct
  misc_feature 1..25: note = Oligonucleotide
  source 1..25: mol_type = other DNA
accaacgcacagacacgcacacaca

SEQ ID NO: 36555 - DNA, 25 bp, synthetic construct
  misc_feature 1..25: note = Oligonucleotide
  source 1..25: mol_type = other DNA
ctcaccaacgcacagacacgcacac

SEQ ID NO: 36556 - DNA, 25 bp, synthetic construct
  misc_feature 1..25: note = Oligonucleotide
  source 1..25: mol_type = other DNA
ccgctcaccaacgcacagacacgca

SEQ ID NO: 36557 - DNA, 25 bp, synthetic construct
  misc_feature 1..25: note = Oligonucleotide
  source 1..25: mol_type = other DNA
tgtccgctcaccaacgcacagacac

SEQ ID NO: 36558 - DNA, 25 bp, synthetic construct
  misc_feature 1..25: note = Oligonucleotide
  source 1..25: mol_type = other DNA
gcgtgtccgctcaccaacgcacaga

SEQ ID NO: 36559 - DNA, 25 bp, synthetic construct
  misc_feature 1..25: note = Oligonucleotide
  source 1..25: mol_type = other DNA
agcgcgtgtccgctcaccaacgcac

SEQ ID NO: 36560 - DNA, 25 bp, synthetic construct
  misc_feature 1..25: note = Oligonucleotide
  source 1..25: mol_type = other DNA
gacagcgcgtgtccgctcaccaacg

SEQ ID NO: 36561 - DNA, 25 bp, synthetic construct
  misc_feature 1..25: note = Oligonucleotide
  source 1..25: mol_type = other DNA
gcagacagcgcgtgtccgctcacca

SEQ ID NO: 36562 - DNA, 25 bp, synthetic construct
  misc_feature 1..25: note = Oligonucleotide
  source 1..25: mol_type = other DNA
ggtgcagacagcgcgtgtccgctca

SEQ ID NO: 36563 - DNA, 25 bp, synthetic construct
  misc_feature 1..25: note = Oligonucleotide
  source 1..25: mol_type = other DNA
gcaggtgcagacagcgcgtgtccgc

SEQ ID NO: 36564 - DNA, 25 bp, synthetic construct
  misc_feature 1..25: note = Oligonucleotide
  source 1..25: mol_type = other DNA
cacgcaggtgcagacagcgcgtgtc

SEQ ID NO: 36565 - DNA, 25 bp, synthetic construct
  misc_feature 1..25: note = Oligonucleotide
  source 1..25: mol_type = other DNA
atgcacgcaggtgcagacagcgcgt

SEQ ID NO: 36566 - DNA, 25 bp, synthetic construct
  misc_feature 1..25: note = Oligonucleotide
  source 1..25: mol_type = other DNA
cgcatgcacgcaggtgcagacagcg

SEQ ID NO: 36567 - DNA, 25 bp, synthetic construct
  misc_feature 1..25: note = Oligonucleotide
  source 1..25: mol_type = other DNA
tgccgcatgcacgcaggtgcagaca

SEQ ID NO: 36568 - DNA, 25 bp, synthetic construct
  misc_feature 1..25: note = Oligonucleotide
  source 1..25: mol_type = other DNA
gtgtgccgcatgcacgcaggtgcag

SEQ ID NO: 36569 - DNA, 25 bp, synthetic construct
  misc_feature 1..25: note = Oligonucleotide
  source 1..25: mol_type = other DNA
catgtgtgccgcatgcacgcaggtg

SEQ ID NO: 36570 - DNA, 25 bp, synthetic construct
  misc_feature 1..25: note = Oligonucleotide
  source 1..25: mol_type = other DNA
agacatgtgtgccgcatgcacgcag

SEQ ID NO: 36571 - DNA, 25 bp, synthetic construct
  misc_feature 1..25: note = Oligonucleotide
  source 1..25: mol_type = other DNA
cacagacatgtgtgccgcatgcacg

SEQ ID NO: 36572 - DNA, 25 bp, synthetic construct
  misc_feature 1..25: note = Oligonucleotide
  source 1..25: mol_type = other DNA
acgcacagacatgtgtgccgcatgc

SEQ ID NO: 36573 - DNA, 25 bp, synthetic construct
  misc_feature 1..25: note = Oligonucleotide
  source 1..25: mol_type = other DNA
cccacgcacagacatgtgtgccgca

SEQ ID NO: 36574 - DNA, 25 bp, synthetic construct
  misc_feature 1..25: note = Oligonucleotide
  source 1..25: mol_type = other DNA
tcacccacgcacagacatgtgtgcc

SEQ ID NO: 36575 - DNA, 25 bp, synthetic construct
  misc_feature 1..25: note = Oligonucleotide
  source 1..25: mol_type = other DNA
cactcacccacgcacagacatgtgt

SEQ ID NO: 36576 - DNA, 25 bp, synthetic construct
  misc_feature 1..25: note = Oligonucleotide
  source 1..25: mol_type = other DNA
gtccactcacccacgcacagacatg

SEQ ID NO: 36577 - DNA, 25 bp, synthetic construct
  misc_feature 1..25: note = Oligonucleotide
  source 1..25: mol_type = other DNA
cgtgtccactcacccacgcacagac

SEQ ID NO: 36578 - DNA, 25 bp, synthetic construct
  misc_feature 1..25: note = Oligonucleotide
  source 1..25: mol_type = other DNA
gcacgtgtccactcacccacgcaca

SEQ ID NO: 36579 - DNA, 25 bp, synthetic construct
  misc_feature 1..25: note = Oligonucleotide
  source 1..25: mol_type = other DNA
acagcacgtgtccactcacccacgc

SEQ ID NO: 36580 - DNA, 25 bp, synthetic construct
  misc_feature 1..25: note = Oligonucleotide
  source 1..25: mol_type = other DNA
cacacagcacgtgtccactcaccca

SEQ ID NO: 36581 - DNA, 25 bp, synthetic construct
  misc_feature 1..25: note = Oligonucleotide
  source 1..25: mol_type = other DNA
gtgcacacagcacgtgtccactcac

SEQ ID NO: 36582 - DNA, 25 bp, synthetic construct
  misc_feature 1..25: note = Oligonucleotide
  source 1..25: mol_type = other DNA
caggtgcacacagcacgtgtccact

SEQ ID NO: 36583 - DNA, 25 bp, synthetic construct
  misc_feature 1..25: note = Oligonucleotide
  source 1..25: mol_type = other DNA
atgcaggtgcacacagcacgtgtcc

SEQ ID NO: 36584 - DNA, 25 bp, synthetic construct
  misc_feature 1..25: note = Oligonucleotide
  source 1..25: mol_type = other DNA
cgcatgcaggtgcacacagcacgtg

SEQ ID NO: 36585 - DNA, 25 bp, synthetic construct
  misc_feature 1..25: note = Oligonucleotide
  source 1..25: mol_type = other DNA
acacgcatgcaggtgcacacagcac

SEQ ID NO: 36586 - DNA, 25 bp, synthetic construct
  misc_feature 1..25: note = Oligonucleotide
  source 1..25: mol_type = other DNA
gccacacgcatgcaggtgcacacag

SEQ ID NO: 36587 - DNA, 25 bp, synthetic construct
  misc_feature 1..25: note = Oligonucleotide
  source 1..25: mol_type = other DNA
tgtgccacacgcatgcaggtgcaca

SEQ ID NO: 36588 - DNA, 25 bp, synthetic construct
  misc_feature 1..25: note = Oligonucleotide
  source 1..25: mol_type = other DNA
acgtgtgccacacgcatgcaggtgc

SEQ ID NO: 36589 - DNA, 25 bp, synthetic construct
  misc_feature 1..25: note = Oligonucleotide
  source 1..25: mol_type = other DNA
cacacgtgtgccacacgcatgcagg

SEQ ID NO: 36590 - DNA, 25 bp, synthetic construct
  misc_feature 1..25: note = Oligonucleotide
  source 1..25: mol_type = other DNA
gcacacacgtgtgccacacgcatgc

SEQ ID NO: 36591 - DNA, 25 bp, synthetic construct
  misc_feature 1..25: note = Oligonucleotide
  source 1..25: mol_type = other DNA
catgcacacacgtgtgccacacgca

SEQ ID NO: 36592 - DNA, 25 bp, synthetic construct
  misc_feature 1..25: note = Oligonucleotide
  source 1..25: mol_type = other DNA
acccatgcacacacgtgtgccacac

SEQ ID NO: 36593 - DNA, 25 bp, synthetic construct
  misc_feature 1..25: note = Oligonucleotide
  source 1..25: mol_type = other DNA
ctcacccatgcacacacgtgtgcca

SEQ ID NO: 36594 - DNA, 25 bp, synthetic construct
  misc_feature 1..25: note = Oligonucleotide
  source 1..25: mol_type = other DNA
ccgctcacccatgcacacacgtgtg

SEQ ID NO: 36595 - DNA, 25 bp, synthetic construct
  misc_feature 1..25: note = Oligonucleotide
  source 1..25: mol_type = other DNA
tatccgctcacccatgcacacacgt

SEQ ID NO: 36596 - DNA, 25 bp, synthetic construct
  misc_feature 1..25: note = Oligonucleotide
  source 1..25: mol_type = other DNA
gcgtatccgctcacccatgcacaca

SEQ ID NO: 36597 - DNA, 25 bp, synthetic construct
  misc_feature 1..25: note = Oligonucleotide
  source 1..25: mol_type = other DNA
agtgcgtatccgctcacccatgcac

SEQ ID NO: 36598 - DNA, 25 bp, synthetic construct
  misc_feature 1..25: note = Oligonucleotide
  source 1..25: mol_type = other DNA
cacagtgcgtatccgctcacccatg

SEQ ID NO: 36599 - DNA, 25 bp, synthetic construct
  misc_feature 1..25: note = Oligonucleotide
  source 1..25: mol_type = other DNA
gcacacagtgcgtatccgctcaccc

SEQ ID NO: 36600 - DNA, 25 bp, synthetic construct
  misc_feature 1..25: note = Oligonucleotide
  source 1..25: mol_type = other DNA
ggcgcacacagtgcgtatccgctca

SEQ ID NO: 36601 - DNA, 25 bp, synthetic construct
  misc_feature 1..25: note = Oligonucleotide
  source 1..25: mol_type = other DNA
gcaggcgcacacagtgcgtatccgc

SEQ ID NO: 36602 - DNA, 25 bp, synthetic construct
  misc_feature 1..25: note = Oligonucleotide
  source 1..25: mol_type = other DNA
catgcaggcgcacacagtgcgtatc

SEQ ID NO: 36603 - DNA, 25 bp, synthetic construct
  misc_feature 1..25: note = Oligonucleotide
  source 1..25: mol_type = other DNA
acgcatgcaggcgcacacagtgcgt

SEQ ID NO: 36604 - DNA, 25 bp, synthetic construct
  misc_feature 1..25: note = Oligonucleotide
  source 1..25: mol_type = other DNA
cacacgcatgcaggcgcacacagtg

SEQ ID NO: 36605 - DNA, 25 bp, synthetic construct
  misc_feature 1..25: note = Oligonucleotide
  source 1..25: mol_type = other DNA
tgccacacgcatgcaggcgcacaca

SEQ ID NO: 36606 - DNA, 25 bp, synthetic construct
  misc_feature 1..25: note = Oligonucleotide
  source 1..25: mol_type = other DNA
gtgtgccacacgcatgcaggcgcac

SEQ ID NO: 36607 - DNA, 25 bp, synthetic construct
  misc_feature 1..25: note = Oligonucleotide
  source 1..25: mol_type = other DNA
catgtgtgccacacgcatgcaggcg

SEQ ID NO: 36608 - DNA, 25 bp, synthetic construct
  misc_feature 1..25: note = Oligonucleotide
  source 1..25: mol_type = other DNA
agacatgtgtgccacacgcatgcag

SEQ ID NO: 36609 - DNA, 25 bp, synthetic construct
  misc_feature 1..25: note = Oligonucleotide
  source 1..25: mol_type = other DNA
cacagacatgtgtgccacacgcatg

SEQ ID NO: 36610 - DNA, 25 bp, synthetic construct
  misc_feature 1..25: note = Oligonucleotide
  source 1..25: mol_type = other DNA
acgcacagacatgtgtgccacacgc

SEQ ID NO: 36611 - DNA, 25 bp, synthetic construct
  misc_feature 1..25: note = Oligonucleotide
  source 1..25: mol_type = other DNA
cccacgcacagacatgtgtgccaca

SEQ ID NO: 36612 - DNA, 25 bp, synthetic construct
  misc_feature 1..25: note = Oligonucleotide
  source 1..25: mol_type = other DNA
tcacccacgcacagacatgtgtgcc

SEQ ID NO: 36613 - DNA, 25 bp, synthetic construct
  misc_feature 1..25: note = Oligonucleotide
  source 1..25: mol_type = other DNA
tgctcacccacgcacagacatgtgt

SEQ ID NO: 36614 - DNA, 25 bp, synthetic construct
  misc_feature 1..25: note = Oligonucleotide
  source 1..25: mol_type = other DNA
gtctgctcacccacgcacagacatg

SEQ ID NO: 36615 - DNA, 25 bp, synthetic construct
  misc_feature 1..25: note = Oligonucleotide
  source 1..25: mol_type = other DNA
cgcgtctgctcacccacgcacagac

SEQ ID NO: 36616 - DNA, 25 bp, synthetic construct
  misc_feature 1..25: note = Oligonucleotide
  source 1..25: mol_type = other DNA
cagcgcgtctgctcacccacgcaca

SEQ ID NO: 36617 - DNA, 25 bp, synthetic construct
  misc_feature 1..25: note = Oligonucleotide
  source 1..25: mol_type = other DNA
acacagcgcgtctgctcacccacgc

SEQ ID NO: 36618 - DNA, 25 bp, synthetic construct
  misc_feature 1..25: note = Oligonucleotide
  source 1..25: mol_type = other DNA
tgcacacagcgcgtctgctcaccca

SEQ ID NO: 36619 - DNA, 25 bp, synthetic construct
  misc_feature 1..25: note = Oligonucleotide
  source 1..25: mol_type = other DNA
aggtgcacacagcgcgtctgctcac

SEQ ID NO: 36620 - DNA, 25 bp, synthetic construct
  misc_feature 1..25: note = Oligonucleotide
  source 1..25: mol_type = other DNA
tgcaggtgcacacagcgcgtctgct

SEQ ID NO: 36621 - DNA, 25 bp, synthetic construct
  misc_feature 1..25: note = Oligonucleotide
  source 1..25: mol_type = other DNA
gcatgcaggtgcacacagcgcgtct

SEQ ID NO: 36622 - DNA, 25 bp, synthetic construct
  misc_feature 1..25: note = Oligonucleotide
  source 1..25: mol_type = other DNA
cacgcatgcaggtgcacacagcgcg

SEQ ID NO: 36623 - DNA, 25 bp, synthetic construct
  misc_feature 1..25: note = Oligonucleotide
  source 1..25: mol_type = other DNA
ccacacgcatgcaggtgcacacagc

SEQ ID NO: 36624 - DNA, 25 bp, synthetic construct
  misc_feature 1..25: note = Oligonucleotide
  source 1..25: mol_type = other DNA
gtgccacacgcatgcaggtgcacac

SEQ ID NO: 36625 - DNA, 25 bp, synthetic construct
  misc_feature 1..25: note = Oligonucleotide
  source 1..25: mol_type = other DNA
cgtgtgccacacgcatgcaggtgca

SEQ ID NO: 36626 - DNA, 25 bp, synthetic construct
  misc_feature 1..25: note = Oligonucleotide
  source 1..25: mol_type = other DNA
acacgtgtgccacacgcatgcaggt

SEQ ID NO: 36627 - DNA, 25 bp, synthetic construct
  misc_feature 1..25: note = Oligonucleotide
  source 1..25: mol_type = other DNA
cacacacgtgtgccacacgcatgca

SEQ ID NO: 36628 - DNA, 25 bp, synthetic construct
  misc_feature 1..25: note = Oligonucleotide
  source 1..25: mol_type = other DNA
acgcacacacgtgtgccacacgcat

SEQ ID NO: 36629 - DNA, 25 bp, synthetic construct
  misc_feature 1..25: note = Oligonucleotide
  source 1..25: mol_type = other DNA
cccacgcacacacgtgtgccacacg

SEQ ID NO: 36630 - DNA, 25 bp, synthetic construct
  misc_feature 1..25: note = Oligonucleotide
  source 1..25: mol_type = other DNA
tcacccacgcacacacgtgtgccac

SEQ ID NO: 36631 - DNA, 25 bp, synthetic construct
  misc_feature 1..25: note = Oligonucleotide
  source 1..25: mol_type = other DNA
cgctcacccacgcacacacgtgtgc

SEQ ID NO: 36632 - DNA, 25 bp, synthetic construct
  misc_feature 1..25: note = Oligonucleotide
  source 1..25: mol_type = other DNA
atccgctcacccacgcacacacgtg

SEQ ID NO: 36633 - DNA, 25 bp, synthetic construct
  misc_feature 1..25: note = Oligonucleotide
  source 1..25: mol_type = other DNA
cgtatccgctcacccacgcacacac

SEQ ID NO: 36634 - DNA, 25 bp, synthetic construct
  misc_feature 1..25: note = Oligonucleotide
  source 1..25: mol_type = other DNA
gcgcgtatccgctcacccacgcaca

SEQ ID NO: 36635 - DNA, 25 bp, synthetic construct
  misc_feature 1..25: note = Oligonucleotide
  source 1..25: mol_type = other DNA
acagcgcgtatccgctcacccacgc

SEQ ID NO: 36636 - DNA, 25 bp, synthetic construct
  misc_feature 1..25: note = Oligonucleotide
  source 1..25: mol_type = other DNA
catacagcgcgtatccgctcaccca

SEQ ID NO: 36637 - DNA, 25 bp, synthetic construct
  misc_feature 1..25: note = Oligonucleotide
  source 1..25: mol_type = other DNA
gtgcatacagcgcgtatccgctcac

SEQ ID NO: 36638 - DNA, 25 bp, synthetic construct
  misc_feature 1..25: note = Oligonucleotide
  source 1..25: mol_type = other DNA
caggtgcatacagcgcgtatccgct

SEQ ID NO: 36639 - DNA, 25 bp, synthetic construct
  misc_feature 1..25: note = Oligonucleotide
  source 1..25: mol_type = other DNA
acgcaggtgcatacagcgcgtatcc

SEQ ID NO: 36640 - DNA, 25 bp, synthetic construct
  misc_feature 1..25: note = Oligonucleotide
  source 1..25: mol_type = other DNA
tgcacgcaggtgcatacagcgcgta

SEQ ID NO: 36641 - DNA, 25 bp, synthetic construct
  misc_feature 1..25: note = Oligonucleotide
  source 1..25: mol_type = other DNA
gcatgcacgcaggtgcatacagcgc

SEQ ID NO: 36642 - DNA, 25 bp, synthetic construct
  misc_feature 1..25: note = Oligonucleotide
  source 1..25: mol_type = other DNA
gctgcatgcacgcaggtgcatacag

SEQ ID NO: 36643 - DNA, 25 bp, synthetic construct
  misc_feature 1..25: note = Oligonucleotide
  source 1..25: mol_type = other DNA
tgtgctgcatgcacgcaggtgcata

SEQ ID NO: 36644 - DNA, 25 bp, synthetic construct
  misc_feature 1..25: note = Oligonucleotide
  source 1..25: mol_type = other DNA
acgtgtgctgcatgcacgcaggtgc

SEQ ID NO: 36645 - DNA, 25 bp, synthetic construct
  misc_feature 1..25: note = Oligonucleotide
  source 1..25: mol_type = other DNA
cagacgtgtgctgcatgcacgcagg

SEQ ID NO: 36646 - DNA, 25 bp, synthetic construct
  misc_feature 1..25: note = Oligonucleotide
  source 1..25: mol_type = other DNA
gcacagacgtgtgctgcatgcacgc

SEQ ID NO: 36647 - DNA, 25 bp, synthetic construct
  misc_feature 1..25: note = Oligonucleotide
  source 1..25: mol_type = other DNA
cacgcacagacgtgtgctgcatgca

SEQ ID NO: 36648 - DNA, 25 bp, synthetic construct
  misc_feature 1..25: note = Oligonucleotide
  source 1..25: mol_type = other DNA
acccacgcacagacgtgtgctgcat

SEQ ID NO: 36649 - DNA, 25 bp, synthetic construct
  misc_feature 1..25: note = Oligonucleotide
  source 1..25: mol_type = other DNA
ctcacccacgcacagacgtgtgctg

SEQ ID NO: 36650 - DNA, 25 bp, synthetic construct
  misc_feature 1..25: note = Oligonucleotide
  source 1..25: mol_type = other DNA
ccgctcacccacgcacagacgtgtg

SEQ ID NO: 36651 - DNA, 25 bp, synthetic construct
  misc_feature 1..25: note = Oligonucleotide
  source 1..25: mol_type = other DNA
tatccgctcacccacgcacagacgt

SEQ ID NO: 36652 - DNA, 25 bp, synthetic construct
  misc_feature 1..25: note = Oligonucleotide
  source 1..25: mol_type = other DNA
gcgtatccgctcacccacgcacaga

SEQ ID NO: 36653 - DNA, 25 bp, synthetic construct
  misc_feature 1..25: note = Oligonucleotide
  source 1..25: mol_type = other DNA
agcgcgtatccgctcacccacgcac

SEQ ID NO: 36654 - DNA, 25 bp, synthetic construct
  misc_feature 1..25: note = Oligonucleotide
  source 1..25: mol_type = other DNA
cacagcgcgtatccgctcacccacg

SEQ ID NO: 36655 - DNA, 25 bp, synthetic construct
  misc_feature 1..25: note = Oligonucleotide
  source 1..25: mol_type = other DNA
gcacacagcgcgtatccgctcaccc

SEQ ID NO: 36656 - DNA, 25 bp, synthetic construct
  misc_feature 1..25: note = Oligonucleotide
  source 1..25: mol_type = other DNA
ggcgcacacagcgcgtatccgctca

SEQ ID NO: 36657 - DNA, 25 bp, synthetic construct
  misc_feature 1..25: note = Oligonucleotide
  source 1..25: mol_type = other DNA
gcaggcgcacacagcgcgtatccgc

SEQ ID NO: 36658 - DNA, 25 bp, synthetic construct
  misc_feature 1..25: note = Oligonucleotide
  source 1..25: mol_type = other DNA
catgcaggcgcacacagcgcgtatc

SEQ ID NO: 36659 - DNA, 25 bp, synthetic construct
  misc_feature 1..25: note = Oligonucleotide
  source 1..25: mol_type = other DNA
acgcatgcaggcgcacacagcgcgt

SEQ ID NO: 36660 - DNA, 25 bp, synthetic construct
  misc_feature 1..25: note = Oligonucleotide
  source 1..25: mol_type = other DNA
cacacgcatgcaggcgcacacagcg

SEQ ID NO: 36661 - DNA, 25 bp, synthetic construct
  misc_feature 1..25: note = Oligonucleotide
  source 1..25: mol_type = other DNA
tgccacacgcatgcaggcgcacaca

SEQ ID NO: 36662 - DNA, 25 bp, synthetic construct
  misc_feature 1..25: note = Oligonucleotide
  source 1..25: mol_type = other DNA
gtgtgccacacgcatgcaggcgcac

SEQ ID NO: 36663 - DNA, 25 bp, synthetic construct
  misc_feature 1..25: note = Oligonucleotide
  source 1..25: mol_type = other DNA
gacgtgtgccacacgcatgcaggcg

SEQ ID NO: 36664 - DNA, 25 bp, synthetic construct
  misc_feature 1..25: note = Oligonucleotide
  source 1..25: mol_type = other DNA
acagacgtgtgccacacgcatgcag

SEQ ID NO: 36665 - DNA, 25 bp, synthetic construct
  misc_feature 1..25: note = Oligonucleotide
  source 1..25: mol_type = other DNA
cgcacagacgtgtgccacacgcatg

SEQ ID NO: 36666 - DNA, 25 bp, synthetic construct
  misc_feature 1..25: note = Oligonucleotide
  source 1..25: mol_type = other DNA
ccacgcacagacgtgtgccacacgc

SEQ ID NO: 36667 - DNA, 25 bp, synthetic construct
  misc_feature 1..25: note = Oligonucleotide
  source 1..25: mol_type = other DNA
cacccacgcacagacgtgtgccaca

SEQ ID NO: 36668 - DNA, 25 bp, synthetic construct
  misc_feature 1..25: note = Oligonucleotide
  source 1..25: mol_type = other DNA
gctcacccacgcacagacgtgtgcc

SEQ ID NO: 36669 - DNA, 25 bp, synthetic construct
  misc_feature 1..25: note = Oligonucleotide
  source 1..25: mol_type = other DNA
tccgctcacccacgcacagacgtgt

SEQ ID NO: 36670 - DNA, 25 bp, synthetic construct
  misc_feature 1..25: note = Oligonucleotide
  source 1..25: mol_type = other DNA
atatccgctcacccacgcacagacg

SEQ ID NO: 36671 - DNA, 25 bp, synthetic construct
  misc_feature 1..25: note = Oligonucleotide
  source 1..25: mol_type = other DNA
tgcatatccgctcacccacgcacag

SEQ ID NO: 36672 - DNA, 25 bp, synthetic construct
  misc_feature 1..25: note = Oligonucleotide
  source 1..25: mol_type = other DNA
cactgcatatccgctcacccacgca

SEQ ID NO: 36673 - DNA, 25 bp, synthetic construct
  misc_feature 1..25: note = Oligonucleotide
  source 1..25: mol_type = other DNA
gcacactgcatatccgctcacccac

SEQ ID NO: 36674 - DNA, 25 bp, synthetic construct
  misc_feature 1..25: note = Oligonucleotide
  source 1..25: mol_type = other DNA
ggcgcacactgcatatccgctcacc

SEQ ID NO: 36675 - DNA, 25 bp, synthetic construct
  misc_feature 1..25: note = Oligonucleotide
  source 1..25: mol_type = other DNA
gcaggcgcacactgcatatccgctc

SEQ ID NO: 36676 - DNA, 25 bp, synthetic construct
  misc_feature 1..25: note = Oligonucleotide
  source 1..25: mol_type = other DNA
catgcaggcgcacactgcatatccg

SEQ ID NO: 36677 - DNA, 25 bp, synthetic construct
  misc_feature 1..25: note = Oligonucleotide
  source 1..25: mol_type = other DNA
acgcatgcaggcgcacactgcatat

SEQ ID NO: 36678 - DNA, 25 bp, synthetic construct
  misc_feature 1..25: note = Oligonucleotide
  source 1..25: mol_type = other DNA
cacacgcatgcaggcgcacactgca

SEQ ID NO: 36679 - DNA, 25 bp, synthetic construct
  misc_feature 1..25: note = Oligonucleotide
  source 1..25: mol_type = other DNA
tgccacacgcatgcaggcgcacact

SEQ ID NO: 36680 - DNA, 25 bp, synthetic construct
  misc_feature 1..25: note = Oligonucleotide
  source 1..25: mol_type = other DNA
gtgtgccacacgcatgcaggcgcac

SEQ ID NO: 36681 - DNA, 25 bp, synthetic construct
  misc_feature 1..25: note = Oligonucleotide
  source 1..25: mol_type = other DNA
cacgtgtgccacacgcatgcaggcg

SEQ ID NO: 36682 - DNA, 25 bp, synthetic construct
  misc_feature 1..25: note = Oligonucleotide
  source 1..25: mol_type = other DNA
acacacgtgtgccacacgcatgcag

SEQ ID NO: 36683 - DNA, 25 bp, synthetic construct
  misc_feature 1..25: note = Oligonucleotide
  source 1..25: mol_type = other DNA
cgcacacacgtgtgccacacgcatg

SEQ ID NO: 36684 - DNA, 25 bp, synthetic construct
  misc_feature 1..25: note = Oligonucleotide
  source 1..25: mol_type = other DNA
ccacgcacacacgtgtgccacacgc

SEQ ID NO: 36685 - DNA, 25 bp, synthetic construct
  misc_feature 1..25: note = Oligonucleotide
  source 1..25: mol_type = other DNA
cacccacgcacacacgtgtgccaca

SEQ ID NO: 36686 - DNA, 25 bp, synthetic construct
  misc_feature 1..25: note = Oligonucleotide
  source 1..25: mol_type = other DNA
gctcacccacgcacacacgtgtgcc

SEQ ID NO: 36687 - DNA, 25 bp, synthetic construct
  misc_feature 1..25: note = Oligonucleotide
  source 1..25: mol_type = other DNA
tccgctcacccacgcacacacgtgt

SEQ ID NO: 36688 - DNA, 25 bp, synthetic construct
  misc_feature 1..25: note = Oligonucleotide
  source 1..25: mol_type = other DNA
gtatccgctcacccacgcacacacg

SEQ ID NO: 36689 - DNA, 25 bp, synthetic construct
  misc_feature 1..25: note = Oligonucleotide
  source 1..25: mol_type = other DNA
cgcgtatccgctcacccacgcacac

SEQ ID NO: 36690 - DNA, 25 bp, synthetic construct
  misc_feature 1..25: note = Oligonucleotide
  source 1..25: mol_type = other DNA
cagcgcgtatccgctcacccacgca

SEQ ID NO: 36691 - DNA, 25 bp, synthetic construct
  misc_feature 1..25: note = Oligonucleotide
  source 1..25: mol_type = other DNA
acacagcgcgtatccgctcacccac

SEQ ID NO: 36692 - DNA, 25 bp, synthetic construct
  misc_feature 1..25: note = Oligonucleotide
  source 1..25: mol_type = other DNA
ggcacacagcgcgtatccgctcacc

SEQ ID NO: 36693 - DNA, 25 bp, synthetic construct
  misc_feature 1..25: note = Oligonucleotide
  source 1..25: mol_type = other DNA
aggggcacacagcgcgtatccgctc

SEQ ID NO: 36694 - DNA, 25 bp, synthetic construct
  misc_feature 1..25: note = Oligonucleotide
  source 1..25: mol_type = other DNA
cgcaggggcacacagcgcgtatccg

SEQ ID NO: 36695 - DNA, 25 bp, synthetic construct
  misc_feature 1..25: note = Oligonucleotide
  source 1..25: mol_type = other DNA
gcacgcaggggcacacagcgcgtat

SEQ ID NO: 36696 - DNA, 25 bp, synthetic construct
  misc_feature 1..25: note = Oligonucleotide
  source 1..25: mol_type = other DNA
catgcacgcaggggcacacagcgcg

SEQ ID NO: 36697 - DNA, 25 bp, synthetic construct
  misc_feature 1..25: note = Oligonucleotide
  source 1..25: mol_type = other DNA
ctgcatgcacgcaggggcacacagc

SEQ ID NO: 36698 - DNA, 25 bp, synthetic construct
  misc_feature 1..25: note = Oligonucleotide
  source 1..25: mol_type = other DNA
gtgctgcatgcacgcaggggcacac

SEQ ID NO: 36699 - DNA, 25 bp, synthetic construct
  misc_feature 1..25: note = Oligonucleotide
  source 1..25: mol_type = other DNA
tgtgtgctgcatgcacgcaggggca

SEQ ID NO: 36700 - DNA, 25 bp, synthetic construct
  misc_feature 1..25: note = Oligonucleotide
  source 1..25: mol_type = other DNA
acatgtgtgctgcatgcacgcaggg

SEQ ID NO: 36701 - DNA, 25 bp, synthetic construct
  misc_feature 1..25: note = Oligonucleotide
  source 1..25: mol_type = other DNA
cagacatgtgtgctgcatgcacgca

SEQ ID NO: 36702 - DNA, 25 bp, synthetic construct
  misc_feature 1..25: note = Oligonucleotide
  source 1..25: mol_type = other DNA
gcacagacatgtgtgctgcatgcac

SEQ ID NO: 36703 - DNA, 25 bp, synthetic construct
  misc_feature 1..25: note = Oligonucleotide
  source 1..25: mol_type = other DNA
cacgcacagacatgtgtgctgcatg

SEQ ID NO: 36704 - DNA, 25 bp, synthetic construct
  misc_feature 1..25: note = Oligonucleotide
  source 1..25: mol_type = other DNA
acccacgcacagacatgtgtgctgc

SEQ ID NO: 36705 - DNA, 25 bp, synthetic construct
  misc_feature 1..25: note = Oligonucleotide
  source 1..25: mol_type = other DNA
ctcacccacgcacagacatgtgtgc

SEQ ID NO: 36706 - DNA, 25 bp, synthetic construct
  misc_feature 1..25: note = Oligonucleotide
  source 1..25: mol_type = other DNA
ccactcacccacgcacagacatgtg

SEQ ID NO: 36707 - DNA, 25 bp, synthetic construct
  misc_feature 1..25: note = Oligonucleotide
  source 1..25: mol_type = other DNA
tgtccactcacccacgcacagacat

SEQ ID NO: 36708 - DNA, 25 bp, synthetic construct
  misc_feature 1..25: note = Oligonucleotide
  source 1..25: mol_type = other DNA
gcatgtccactcacccacgcacaga

SEQ ID NO: 36709 - DNA, 25 bp, synthetic construct
  misc_feature 1..25: note = Oligonucleotide
  source 1..25: mol_type = other DNA
agcgcatgtccactcacccacgcac

SEQ ID NO: 36710 - DNA, 25 bp, synthetic construct
  misc_feature 1..25: note = Oligonucleotide
  source 1..25: mol_type = other DNA
cacagcgcatgtccactcacccacg

SEQ ID NO: 36711 - DNA, 25 bp, synthetic construct
  misc_feature 1..25: note = Oligonucleotide
  source 1..25: mol_type = other DNA
gcacacagcgcatgtccactcaccc

SEQ ID NO: 36712 - DNA, 25 bp, synthetic construct
  misc_feature 1..25: note = Oligonucleotide
  source 1..25: mol_type = other DNA
ggtgcacacagcgcatgtccactca

SEQ ID NO: 36713 - DNA, 25 bp, synthetic construct
  misc_feature 1..25: note = Oligonucleotide
  source 1..25: mol_type = other DNA
gcaggtgcacacagcgcatgtccac

SEQ ID NO: 36714 - DNA, 25 bp, synthetic construct
  misc_feature 1..25: note = Oligonucleotide
  source 1..25: mol_type = other DNA
catgcaggtgcacacagcgcatgtc

SEQ ID NO: 36715 - DNA, 25 bp, synthetic construct
  misc_feature 1..25: note = Oligonucleotide
  source 1..25: mol_type = other DNA
atgcatgcaggtgcacacagcgcat

SEQ ID NO: 36716 - DNA, 25 bp, synthetic construct
  misc_feature 1..25: note = Oligonucleotide
  source 1..25: mol_type = other DNA
cacatgcatgcaggtgcacacagcg

SEQ ID NO: 36717 - DNA, 25 bp, synthetic construct
  misc_feature 1..25: note = Oligonucleotide
  source 1..25: mol_type = other DNA
tgccacatgcatgcaggtgcacaca

SEQ ID NO: 36718 - DNA, 25 bp, synthetic construct
  misc_feature 1..25: note = Oligonucleotide
  source 1..25: mol_type = other DNA
gtgtgccacatgcatgcaggtgcac

SEQ ID NO: 36719 - DNA, 25 bp, synthetic construct
  misc_feature 1..25: note = Oligonucleotide
  source 1..25: mol_type = other DNA
tgtgtgtgccacatgcatgcaggtg

SEQ ID NO: 36720 - DNA, 25 bp, synthetic construct
  misc_feature 1..25: note = Oligonucleotide
  source 1..25: mol_type = other DNA
gtgtgtgtgtgccacatgcatgcag

SEQ ID NO: 36721 - DNA, 25 bp, synthetic construct
  misc_feature 1..25: note = Oligonucleotide
  source 1..25: mol_type = other DNA
cttgtgtgtgtgtgccacatgcatg

SEQ ID NO: 36722 - DNA, 25 bp, synthetic construct
  misc_feature 1..25: note = Oligonucleotide
  source 1..25: mol_type = other DNA
ggacttgtgtgtgtgtgccacatgc

SEQ ID NO: 36723 - DNA, 25 bp, synthetic construct
  misc_feature 1..25: note = Oligonucleotide
  source 1..25: mol_type = other DNA
cagggacttgtgtgtgtgtgccaca

SEQ ID NO: 36724 - DNA, 25 bp, synthetic construct
  misc_feature 1..25: note = Oligonucleotide
  source 1..25: mol_type = other DNA
aagcagggacttgtgtgtgtgtgcc

SEQ ID NO: 36725 - DNA, 25 bp, synthetic construct
  misc_feature 1..25: note = Oligonucleotide
  source 1..25: mol_type = other DNA
cacaagcagggacttgtgtgtgtgt

SEQ ID NO: 36726 - DNA, 25 bp, synthetic construct
  misc_feature 1..25: note = Oligonucleotide
  source 1..25: mol_type = other DNA
aaccacaagcagggacttgtgtgtg

SEQ ID NO: 36727 - DNA, 25 bp, synthetic construct
  misc_feature 1..25: note = Oligonucleotide
  source 1..25: mol_type = other DNA
aacaaccacaagcagggacttgtgt

SEQ ID NO: 36728 - DNA, 25 bp, synthetic construct
  misc_feature 1..25: note = Oligonucleotide
  source 1..25: mol_type = other DNA
ggaaacaaccacaagcagggacttg

SEQ ID NO: 36729 - DNA, 25 bp, synthetic construct
  misc_feature 1..25: note = Oligonucleotide
  source 1..25: mol_type = other DNA
ggaggaaacaaccacaagcagggac

SEQ ID NO: 36730 - DNA, 25 bp, synthetic construct
  misc_feature 1..25: note = Oligonucleotide
  source 1..25: mol_type = other DNA
caaggaggaaacaaccacaagcagg

SEQ ID NO: 36731 - DNA, 25 bp, synthetic construct
  misc_feature 1..25: note = Oligonucleotide
  source 1..25: mol_type = other DNA
agccaaggaggaaacaaccacaagc

SEQ ID NO: 36732 - DNA, 25 bp, synthetic construct
  misc_feature 1..25: note = Oligonucleotide
  source 1..25: mol_type = other DNA
gaaagccaaggaggaaacaaccaca

SEQ ID NO: 36733 - DNA, 25 bp, synthetic construct
  misc_feature 1..25: note = Oligonucleotide
  source 1..25: mol_type = other DNA
cttgaaagccaaggaggaaacaacc

SEQ ID NO: 36734 - DNA, 25 bp, synthetic construct
  misc_feature 1..25: note = Oligonucleotide
  source 1..25: mol_type = other DNA
tgccttgaaagccaaggaggaaaca

SEQ ID NO: 36735 - DNA, 25 bp, synthetic construct
  misc_feature 1..25: note = Oligonucleotide
  source 1..25: mol_type = other DNA
acatgccttgaaagccaaggaggaa

SEQ ID NO: 36736 - DNA, 25 bp, synthetic construct
  misc_feature 1..25: note = Oligonucleotide
  source 1..25: mol_type = other DNA
ggtacatgccttgaaagccaaggag

SEQ ID NO: 36737 - DNA, 25 bp, synthetic construct
  misc_feature 1..25: note = Oligonucleotide
  source 1..25: mol_type = other DNA
gttggtacatgccttgaaagccaag

SEQ ID NO: 36738 - DNA, 25 bp, synthetic construct
  misc_feature 1..25: note = Oligonucleotide
  source 1..25: mol_type = other DNA
tcagttggtacatgccttgaaagcc

SEQ ID NO: 36739 - DNA, 25 bp, synthetic construct
  misc_feature 1..25: note = Oligonucleotide
  source 1..25: mol_type = other DNA
gagtcagttggtacatgccttgaaa

SEQ ID NO: 36740 - DNA, 25 bp, synthetic construct
  misc_feature 1..25: note = Oligonucleotide
  source 1..25: mol_type = other DNA
ctggagtcagttggtacatgccttg

SEQ ID NO: 36741 - DNA, 25 bp, synthetic construct
  misc_feature 1..25: note = Oligonucleotide
  source 1..25: mol_type = other DNA
actctggagtcagttggtacatgcc

SEQ ID NO: 36742 - DNA, 25 bp, synthetic construct
  misc_feature 1..25: note = Oligonucleotide
  source 1..25: mol_type = other DNA
ccaactctggagtcagttggtacat

SEQ ID NO: 36743 - DNA, 25 bp, synthetic construct
  misc_feature 1..25: note = Oligonucleotide
  source 1..25: mol_type = other DNA
tgcccaactctggagtcagttggta

SEQ ID NO: 36744 - DNA, 25 bp, synthetic construct
  misc_feature 1..25: note = Oligonucleotide
  source 1..25: mol_type = other DNA
atctgcccaactctggagtcagttg

SEQ ID NO: 36745 - DNA, 25 bp, synthetic construct
  misc_feature 1..25: note = Oligonucleotide
  source 1..25: mol_type = other DNA
caaatctgcccaactctggagtcag

SEQ ID NO: 36746 - DNA, 25 bp, synthetic construct
  misc_feature 1..25: note = Oligonucleotide
  source 1..25: mol_type = other DNA
tagcaaatctgcccaactctggagt

SEQ ID NO: 36747 - DNA, 25 bp, synthetic construct
  misc_feature 1..25: note = Oligonucleotide
  source 1..25: mol_type = other DNA
gaatagcaaatctgcccaactctgg

SEQ ID NO: 36748 - DNA, 25 bp, synthetic construct
  misc_feature 1..25: note = Oligonucleotide
  source 1..25: mol_type = other DNA
cgtgaatagcaaatctgcccaactc

SEQ ID NO: 36749 - DNA, 25 bp, synthetic construct
  misc_feature 1..25: note = Oligonucleotide
  source 1..25: mol_type = other DNA
gaccgtgaatagcaaatctgcccaa

SEQ ID NO: 36750 - DNA, 25 bp, synthetic construct
  misc_feature 1..25: note = Oligonucleotide
  source 1..25: mol_type = other DNA
tcagaccgtgaatagcaaatctgcc

SEQ ID NO: 36751 - DNA, 25 bp, synthetic construct
  misc_feature 1..25: note = Oligonucleotide
  source 1..25: mol_type = other DNA
ttatcagaccgtgaatagcaaatct

SEQ ID NO: 36752 - DNA, 25 bp, synthetic construct
  misc_feature 1..25: note = Oligonucleotide
  source 1..25: mol_type = other DNA
tctttatcagaccgtgaatagcaaa

SEQ ID NO: 36753 - DNA, 25 bp, synthetic construct
  misc_feature 1..25: note = Oligonucleotide
  source 1..25: mol_type = other DNA
acctctttatcagaccgtgaatagc

SEQ ID NO: 36754 - DNA, 25 bp, synthetic construct
  misc_feature 1..25: note = Oligonucleotide
  source 1..25: mol_type = other DNA
tacacctctttatcagaccgtgaat

SEQ ID NO: 36755 - DNA, 25 bp, synthetic construct
  misc_feature 1..25: note = Oligonucleotide
  source 1..25: mol_type = other DNA
gcctacacctctttatcagaccgtg

SEQ ID NO: 36756 - DNA, 25 bp, synthetic construct
  misc_feature 1..25: note = Oligonucleotide
  source 1..25: mol_type = other DNA
ccagcctacacctctttatcagacc

SEQ ID NO: 36757 - DNA, 25 bp, synthetic construct
  misc_feature 1..25: note = Oligonucleotide
  source 1..25: mol_type = other DNA
cccccagcctacacctctttatcag

SEQ ID NO: 36758 - DNA, 25 bp, synthetic construct
  misc_feature 1..25: note = Oligonucleotide
  source 1..25: mol_type = other DNA
ctgcccccagcctacacctctttat

SEQ ID NO: 36759 - DNA, 25 bp, synthetic construct
  misc_feature 1..25: note = Oligonucleotide
  source 1..25: mol_type = other DNA
aatctgcccccagcctacacctctt

SEQ ID NO: 36760 - DNA, 25 bp, synthetic construct
  misc_feature 1..25: note = Oligonucleotide
  source 1..25: mol_type = other DNA
ccaaatctgcccccagcctacacct

SEQ ID NO: 36761 - DNA, 25 bp, synthetic construct
  misc_feature 1..25: note = Oligonucleotide
  source 1..25: mol_type = other DNA
ctcccaaatctgcccccagcctaca

SEQ ID NO: 36762 - DNA, 25 bp, synthetic construct
  misc_feature 1..25: note = Oligonucleotide
  source 1..25: mol_type = other DNA
gacctcccaaatctgcccccagcct

SEQ ID NO: 36763 - DNA, 25 bp, synthetic construct
  misc_feature 1..25: note = Oligonucleotide
  source 1..25: mol_type = other DNA
catgacctcccaaatctgcccccag

SEQ ID NO: 36764 - DNA, 25 bp, synthetic construct
  misc_feature 1..25: note = Oligonucleotide
  source 1..25: mol_type = other DNA
aaccatgacctcccaaatctgcccc

SEQ ID NO: 36765 - DNA, 25 bp, synthetic construct
  misc_feature 1..25: note = Oligonucleotide
  source 1..25: mol_type = other DNA
aaaaaccatgacctcccaaatctgc

SEQ ID NO: 36766 - DNA, 25 bp, synthetic construct
  misc_feature 1..25: note = Oligonucleotide
  source 1..25: mol_type = other DNA
cccaaaaaccatgacctcccaaatc

SEQ ID NO: 36767 - DNA, 25 bp, synthetic construct
  misc_feature 1..25: note = Oligonucleotide
  source 1..25: mol_type = other DNA
tcccccaaaaaccatgacctcccaa

SEQ ID NO: 36768 - DNA, 25 bp, synthetic construct
  misc_feature 1..25: note = Oligonucleotide
  source 1..25: mol_type = other DNA
acctcccccaaaaaccatgacctcc

SEQ ID NO: 36769 - DNA, 25 bp, synthetic construct
  misc_feature 1..25: note = Oligonucleotide
  source 1..25: mol_type = other DNA
accacctcccccaaaaaccatgacc

SEQ ID NO: 36770 - DNA, 25 bp, synthetic construct
  misc_feature 1..25: note = Oligonucleotide
  source 1..25: mol_type = other DNA
accaccacctcccccaaaaaccatg

SEQ ID NO: 36771 - DNA, 25 bp, synthetic construct
  misc_feature 1..25: note = Oligonucleotide
  source 1..25: mol_type = other DNA
ctcaccaccacctcccccaaaaacc

SEQ ID NO: 36772 - DNA, 25 bp, synthetic construct
  misc_feature 1..25: note = Oligonucleotide
  source 1..25: mol_type = other DNA
cctctcaccaccacctcccccaaaa

SEQ ID NO: 36773 - DNA, 25 bp, synthetic construct
  misc_feature 1..25: note = Oligonucleotide
  source 1..25: mol_type = other DNA
atccctctcaccaccacctccccca

SEQ ID NO: 36774 - DNA, 25 bp, synthetic construct
  misc_feature 1..25: note = Oligonucleotide
  source 1..25: mol_type = other DNA
cccatccctctcaccaccacctccc

SEQ ID NO: 36775 - DNA, 25 bp, synthetic construct
  misc_feature 1..25: note = Oligonucleotide
  source 1..25: mol_type = other DNA
caccccatccctctcaccaccacct

SEQ ID NO: 36776 - DNA, 25 bp, synthetic construct
  misc_feature 1..25: note = Oligonucleotide
  source 1..25: mol_type = other DNA
ccccaccccatccctctcaccacca

SEQ ID NO: 36777 - DNA, 25 bp, synthetic construct
  misc_feature 1..25: note = Oligonucleotide
  source 1..25: mol_type = other DNA
tttccccaccccatccctctcacca

SEQ ID NO: 36778 - DNA, 25 bp, synthetic construct
  misc_feature 1..25: note = Oligonucleotide
  source 1..25: mol_type = other DNA
tcatttccccaccccatccctctca

SEQ ID NO: 36779 - DNA, 25 bp, synthetic construct
  misc_feature 1..25: note = Oligonucleotide
  source 1..25: mol_type = other DNA
cactcatttccccaccccatccctc

SEQ ID NO: 36780 - DNA, 25 bp, synthetic construct
  misc_feature 1..25: note = Oligonucleotide
  source 1..25: mol_type = other DNA
ccacactcatttccccaccccatcc

SEQ ID NO: 36781 - DNA, 25 bp, synthetic construct
  misc_feature 1..25: note = Oligonucleotide
  source 1..25: mol_type = other DNA
tatccacactcatttccccacccca

SEQ ID NO: 36782 - DNA, 25 bp, synthetic construct
  misc_feature 1..25: note = Oligonucleotide
  source 1..25: mol_type = other DNA
cattatccacactcatttccccacc

SEQ ID NO: 36783 - DNA, 25 bp, synthetic construct
  misc_feature 1..25: note = Oligonucleotide
  source 1..25: mol_type = other DNA
ccccattatccacactcatttcccc

SEQ ID NO: 36784 - DNA, 25 bp, synthetic construct
  misc_feature 1..25: note = Oligonucleotide
  source 1..25: mol_type = other DNA
gggccccattatccacactcatttc

SEQ ID NO: 36785 - DNA, 25 bp, synthetic construct
  misc_feature 1..25: note = Oligonucleotide
  source 1..25: mol_type = other DNA
cccgggccccattatccacactcat

SEQ ID NO: 36786 - DNA, 25 bp, synthetic construct
  misc_feature 1..25: note = Oligonucleotide
  source 1..25: mol_type = other DNA
gcacccgggccccattatccacact

SEQ ID NO: 36787 - DNA, 25 bp, synthetic construct
  misc_feature 1..25: note = Oligonucleotide
  source 1..25: mol_type = other DNA
tcggcacccgggccccattatccac

SEQ ID NO: 36788 - DNA, 25 bp, synthetic construct
  misc_feature 1..25: note = Oligonucleotide
  source 1..25: mol_type = other DNA
ggctcggcacccgggccccattatc

SEQ ID NO: 36789 - DNA, 25 bp, synthetic construct
  misc_feature 1..25: note = Oligonucleotide
  source 1..25: mol_type = other DNA
gcaggctcggcacccgggccccatt

SEQ ID NO: 36790 - DNA, 25 bp, synthetic construct
  misc_feature 1..25: note = Oligonucleotide
  source 1..25: mol_type = other DNA
gaggcaggctcggcacccgggcccc

SEQ ID NO: 36791 - DNA, 25 bp, synthetic construct
  misc_feature 1..25: note = Oligonucleotide
  source 1..25: mol_type = other DNA
taagaggcaggctcggcacccgggc

SEQ ID NO: 36792 - DNA, 25 bp, synthetic construct
  misc_feature 1..25: note = Oligonucleotide
  source 1..25: mol_type = other DNA
gagtaagaggcaggctcggcacccg

SEQ ID NO: 36793 - DNA, 25 bp, synthetic construct
  misc_feature 1..25: note = Oligonucleotide
  source 1..25: mol_type = other DNA
agggagtaagaggcaggctcggcac

SEQ ID NO: 36794 - DNA, 25 bp, synthetic construct
  misc_feature 1..25: note = Oligonucleotide
  source 1..25: mol_type = other DNA
taaagggagtaagaggcaggctcgg

SEQ ID NO: 36795 - DNA, 25 bp, synthetic construct
  misc_feature 1..25: note = Oligonucleotide
  source 1..25: mol_type = other DNA
gagtaaagggagtaagaggcaggct

SEQ ID NO: 36796 - DNA, 25 bp, synthetic construct
  misc_feature 1..25: note = Oligonucleotide
  source 1..25: mol_type = other DNA
acagagtaaagggagtaagaggcag

SEQ ID NO: 36797 - DNA, 25 bp, synthetic construct
  misc_feature 1..25: note = Oligonucleotide
  source 1..25: mol_type = other DNA
gaaacagagtaaagggagtaagagg

SEQ ID NO: 36798 - DNA, 25 bp, synthetic construct
  misc_feature 1..25: note = Oligonucleotide
  source 1..25: mol_type = other DNA
caagaaacagagtaaagggagtaag

SEQ ID NO: 36799 - DNA, 25 bp, synthetic construct
  misc_feature 1..25: note = Oligonucleotide
  source 1..25: mol_type = other DNA
aatcaagaaacagagtaaagggagt

SEQ ID NO: 36800 - DNA, 25 bp, synthetic construct
  misc_feature 1..25: note = Oligonucleotide
  source 1..25: mol_type = other DNA
tggaatcaagaaacagagtaaaggg

SEQ ID NO: 36801 - DNA, 25 bp, synthetic construct
  misc_feature 1..25: note = Oligonucleotide
  source 1..25: mol_type = other DNA
gcttggaatcaagaaacagagtaaa

SEQ ID NO: 36802 - DNA, 25 bp, synthetic construct
  misc_feature 1..25: note = Oligonucleotide
  source 1..25: mol_type = other DNA
gaggcttggaatcaagaaacagagt

SEQ ID NO: 36803 - DNA, 25 bp, synthetic construct
  misc_feature 1..25: note = Oligonucleotide
  source 1..25: mol_type = other DNA
atggaggcttggaatcaagaaacag

SEQ ID NO: 36804 - DNA, 25 bp, synthetic construct
  misc_feature 1..25: note = Oligonucleotide
  source 1..25: mol_type = other DNA
cgaatggaggcttggaatcaagaaa

SEQ ID NO: 36805 - DNA, 25 bp, synthetic construct
  misc_feature 1..25: note = Oligonucleotide
  source 1..25: mol_type = other DNA
ctccgaatggaggcttggaatcaag

SEQ ID NO: 36806 - DNA, 25 bp, synthetic construct
  misc_feature 1..25: note = Oligonucleotide
  source 1..25: mol_type = other DNA
cttctccgaatggaggcttggaatc

SEQ ID NO: 36807 - DNA, 25 bp, synthetic construct
  misc_feature 1..25: note = Oligonucleotide
  source 1..25: mol_type = other DNA
tttcttctccgaatggaggcttgga

SEQ ID NO: 36808 - DNA, 25 bp, synthetic construct
  misc_feature 1..25: note = Oligonucleotide
  source 1..25: mol_type = other DNA
ccttttcttctccgaatggaggctt

SEQ ID NO: 36809 - DNA, 25 bp, synthetic construct
  misc_feature 1..25: note = Oligonucleotide
  source 1..25: mol_type = other DNA
cccccttttcttctccgaatggagg

SEQ ID NO: 36810 - DNA, 25 bp, synthetic construct
  misc_feature 1..25: note = Oligonucleotide
  source 1..25: mol_type = other DNA
tcacccccttttcttctccgaatgg

SEQ ID NO: 36811 - DNA, 25 bp, synthetic construct
  misc_feature 1..25: note = Oligonucleotide
  source 1..25: mol_type = other DNA
gactcacccccttttcttctccgaa

SEQ ID NO: 36812 - DNA, 25 bp, synthetic construct
  misc_feature 1..25: note = Oligonucleotide
  source 1..25: mol_type = other DNA
gatgactcacccccttttcttctcc

SEQ ID NO: 36813 - DNA, 25 bp, synthetic construct
  misc_feature 1..25: note = Oligonucleotide
  source 1..25: mol_type = other DNA
gcagatgactcacccccttttcttc

SEQ ID NO: 36814 - DNA, 25 bp, synthetic construct
  misc_feature 1..25: note = Oligonucleotide
  source 1..25: mol_type = other DNA
caggcagatgactcacccccttttc

SEQ ID NO: 36815 - DNA, 25 bp, synthetic construct
  misc_feature 1..25: note = Oligonucleotide
  source 1..25: mol_type = other DNA
acacaggcagatgactcaccccctt

SEQ ID NO: 36816 - DNA, 25 bp, synthetic construct
  misc_feature 1..25: note = Oligonucleotide
  source 1..25: mol_type = other DNA
gggacacaggcagatgactcacccc

SEQ ID NO: 36817 - DNA, 25 bp, synthetic construct
  misc_feature 1..25: note = Oligonucleotide
  source 1..25: mol_type = other DNA
ctctgcacagcaaggaggctccatc

SEQ ID NO: 36818 - DNA, 25 bp, synthetic construct
  misc_feature 1..25: note = Oligonucleotide
  source 1..25: mol_type = other DNA
cttctctgcacagcaaggaggctcc

SEQ ID NO: 36819 - DNA, 25 bp, synthetic construct
  misc_feature 1..25: note = Oligonucleotide
  source 1..25: mol_type = other DNA
cagcttctctgcacagcaaggaggc

SEQ ID NO: 36820 - DNA, 25 bp, synthetic construct
  misc_feature 1..25: note = Oligonucleotide
  source 1..25: mol_type = other DNA
gtccagcttctctgcacagcaagga

SEQ ID NO: 36821 - DNA, 25 bp, synthetic construct
  misc_feature 1..25: note = Oligonucleotide
  source 1..25: mol_type = other DNA
ctcgtccagcttctctgcacagcaa

SEQ ID NO: 36822 - DNA, 25 bp, synthetic construct
  misc_feature 1..25: note = Oligonucleotide
  source 1..25: mol_type = other DNA
catctcgtccagcttctctgcacag

SEQ ID NO: 36823 - DNA, 25 bp, synthetic construct
  misc_feature 1..25: note = Oligonucleotide
  source 1..25: mol_type = other DNA
cagcatctcgtccagcttctctgca

SEQ ID NO: 36824 - DNA, 25 bp, synthetic construct
  misc_feature 1..25: note = Oligonucleotide
  source 1..25: mol_type = other DNA
tgccagcatctcgtccagcttctct

SEQ ID NO: 36825 - DNA, 25 bp, synthetic construct
  misc_feature 1..25: note = Oligonucleotide
  source 1..25: mol_type = other DNA
ggctgccagcatctcgtccagcttc

SEQ ID NO: 36826 - DNA, 25 bp, synthetic construct
  misc_feature 1..25: note = Oligonucleotide
  source 1..25: mol_type = other DNA
ggcggctgccagcatctcgtccagc

SEQ ID NO: 36827 - DNA, 25 bp, synthetic construct
  misc_feature 1..25: note = Oligonucleotide
  source 1..25: mol_type = other DNA
tgcggcggctgccagcatctcgtcc

SEQ ID NO: 36828 - DNA, 25 bp, synthetic construct
  misc_feature 1..25: note = Oligonucleotide
  source 1..25: mol_type = other DNA
ctctgcggcggctgccagcatctcg

SEQ ID NO: 36829 - DNA, 25 bp, synthetic construct
  misc_feature 1..25: note = Oligonucleotide
  source 1..25: mol_type = other DNA
tggctctgcggcggctgccagcatc

SEQ ID NO: 36830 - DNA, 25 bp, synthetic construct
  misc_feature 1..25: note = Oligonucleotide
  source 1..25: mol_type = other DNA
cgttggctctgcggcggctgccagc

SEQ ID NO: 36831 - DNA, 25 bp, synthetic construct
  misc_feature 1..25: note = Oligonucleotide
  source 1..25: mol_type = other DNA
cagcgttggctctgcggcggctgcc

SEQ ID NO: 36832 - DNA, 25 bp, synthetic construct
  misc_feature 1..25: note = Oligonucleotide
  source 1..25: mol_type = other DNA
ccgcagcgttggctctgcggcggct

SEQ ID NO: 36833 - DNA, 25 bp, synthetic construct
  misc_feature 1..25: note = Oligonucleotide
  source 1..25: mol_type = other DNA
tggccgcagcgttggctctgcggcg

SEQ ID NO: 36834 - DNA, 25 bp, synthetic construct
  misc_feature 1..25: note = Oligonucleotide
  source 1..25: mol_type = other DNA
gtctggccgcagcgttggctctgcg

SEQ ID NO: 36835 - DNA, 25 bp, synthetic construct
  misc_feature 1..25: note = Oligonucleotide
  source 1..25: mol_type = other DNA
gatgtctggccgcagcgttggctct

SEQ ID NO: 36836 - DNA, 25 bp, synthetic construct
  misc_feature 1..25: note = Oligonucleotide
  source 1..25: mol_type = other DNA
tgcgatgtctggccgcagcgttggc

SEQ ID NO: 36837 - DNA, 25 bp, synthetic construct
  misc_feature 1..25: note = Oligonucleotide
  source 1..25: mol_type = other DNA
gtctgcgatgtctggccgcagcgtt

SEQ ID NO: 36838 - DNA, 25 bp, synthetic construct
  misc_feature 1..25: note = Oligonucleotide
  source 1..25: mol_type = other DNA
tgcgtctgcgatgtctggccgcagc

SEQ ID NO: 36839 - DNA, 25 bp, synthetic construct
  misc_feature 1..25: note = Oligonucleotide
  source 1..25: mol_type = other DNA
gtctgcgtctgcgatgtctggccgc

SEQ ID NO: 36840 - DNA, 25 bp, synthetic construct
  misc_feature 1..25: note = Oligonucleotide
  source 1..25: mol_type = other DNA
ggagtctgcgtctgcgatgtctggc

SEQ ID NO: 36841 - DNA, 25 bp, synthetic construct
  misc_feature 1..25: note = Oligonucleotide
  source 1..25: mol_type = other DNA
tctggagtctgcgtctgcgatgtct

SEQ ID NO: 36842 - DNA, 25 bp, synthetic construct
  misc_feature 1..25: note = Oligonucleotide
  source 1..25: mol_type = other DNA
ggctctggagtctgcgtctgcgatg

SEQ ID NO: 36843 - DNA, 25 bp, synthetic construct
  misc_feature 1..25: note = Oligonucleotide
  source 1..25: mol_type = other DNA
ggcggctctggagtctgcgtctgcg

SEQ ID NO: 36844 - DNA, 25 bp, synthetic construct
  misc_feature 1..25: note = Oligonucleotide
  source 1..25: mol_type = other DNA
ggtggcggctctggagtctgcgtct

SEQ ID NO: 36845 - DNA, 25 bp, synthetic construct
  misc_feature 1..25: note = Oligonucleotide
  source 1..25: mol_type = other DNA
gacggtggcggctctggagtctgcg

SEQ ID NO: 36846 - DNA, 25 bp, synthetic construct
  misc_feature 1..25: note = Oligonucleotide
  source 1..25: mol_type = other DNA
tttgacggtggcggctctggagtct

SEQ ID NO: 36847 - DNA, 25 bp, synthetic construct
  misc_feature 1..25: note = Oligonucleotide
  source 1..25: mol_type = other DNA
ctgtttgacggtggcggctctggag

SEQ ID NO: 36848 - DNA, 25 bp, synthetic construct
  misc_feature 1..25: note = Oligonucleotide
  source 1..25: mol_type = other DNA
cctctgtttgacggtggcggctctg

SEQ ID NO: 36849 - DNA, 25 bp, synthetic construct
  misc_feature 1..25: note = Oligonucleotide
  source 1..25: mol_type = other DNA
gggcctctgtttgacggtggcggct

SEQ ID NO: 36850 - DNA, 25 bp, synthetic construct
  misc_feature 1..25: note = Oligonucleotide
  source 1..25: mol_type = other DNA
ggtgggcctctgtttgacggtggcg

SEQ ID NO: 36851 - DNA, 25 bp, synthetic construct
  misc_feature 1..25: note = Oligonucleotide
  source 1..25: mol_type = other DNA
actggtgggcctctgtttgacggtg

SEQ ID NO: 36852 - DNA, 25 bp, synthetic construct
  misc_feature 1..25: note = Oligonucleotide
  source 1..25: mol_type = other DNA
ccgactggtgggcctctgtttgacg

SEQ ID NO: 36853 - DNA, 25 bp, synthetic construct
  misc_feature 1..25: note = Oligonucleotide
  source 1..25: mol_type = other DNA
cctccgactggtgggcctctgtttg

SEQ ID NO: 36854 - DNA, 25 bp, synthetic construct
  misc_feature 1..25: note = Oligonucleotide
  source 1..25: mol_type = other DNA
gatcctccgactggtgggcctctgt

SEQ ID NO: 36855 - DNA, 25 bp, synthetic construct
  misc_feature 1..25: note = Oligonucleotide
  source 1..25: mol_type = other DNA
tgtgatcctccgactggtgggcctc

SEQ ID NO: 36856 - DNA, 25 bp, synthetic construct
  misc_feature 1..25: note = Oligonucleotide
  source 1..25: mol_type = other DNA
gggtgtgatcctccgactggtgggc

SEQ ID NO: 36857 - DNA, 25 bp, synthetic construct
  misc_feature 1..25: note = Oligonucleotide
  source 1..25: mol_type = other DNA
ggcgggtgtgatcctccgactggtg

SEQ ID NO: 36858 - DNA, 25 bp, synthetic construct
  misc_feature 1..25: note = Oligonucleotide
  source 1..25: mol_type = other DNA
ctcggcgggtgtgatcctccgactg

SEQ ID NO: 36859 - DNA, 25 bp, synthetic construct
  misc_feature 1..25: note = Oligonucleotide
  source 1..25: mol_type = other DNA
aatctcggcgggtgtgatcctccga

SEQ ID NO: 36860 - DNA, 25 bp, synthetic construct
  misc_feature 1..25: note = Oligonucleotide
  source 1..25: mol_type = other DNA
gctaatctcggcgggtgtgatcctc

SEQ ID NO: 36861 - DNA, 25 bp, synthetic construct
  misc_feature 1..25: note = Oligonucleotide
  source 1..25: mol_type = other DNA
tacgctaatctcggcgggtgtgatc

SEQ ID NO: 36862 - DNA, 25 bp, synthetic construct
  misc_feature 1..25: note = Oligonucleotide
  source 1..25: mol_type = other DNA
ccttacgctaatctcggcgggtgtg

SEQ ID NO: 36863 - DNA, 25 bp, synthetic construct
  misc_feature 1..25: note = Oligonucleotide
  source 1..25: mol_type = other DNA
ggcccttacgctaatctcggcgggt

SEQ ID NO: 36864 - DNA, 25 bp, synthetic construct
  misc_feature 1..25: note = Oligonucleotide
  source 1..25: mol_type = other DNA
cgtggcccttacgctaatctcggcg

SEQ ID NO: 36865 - DNA, 25 bp, synthetic construct
  misc_feature 1..25: note = Oligonucleotide
  source 1..25: mol_type = other DNA
gcccgtggcccttacgctaatctcg

SEQ ID NO: 36866 - DNA, 25 bp, synthetic construct
  misc_feature 1..25: note = Oligonucleotide
  source 1..25: mol_type = other DNA
gccgcccgtggcccttacgctaatc

SEQ ID NO: 36867 - DNA, 25 bp, synthetic construct
  misc_feature 1..25: note = Oligonucleotide
  source 1..25: mol_type = other DNA
ccagccgcccgtggcccttacgcta

SEQ ID NO: 36868 - DNA, 25 bp, synthetic construct
  misc_feature 1..25: note = Oligonucleotide
  source 1..25: mol_type = other DNA
ctcccagccgcccgtggcccttacg

SEQ ID NO: 36869 - DNA, 25 bp, synthetic construct
  misc_feature 1..25: note = Oligonucleotide
  source 1..25: mol_type = other DNA
gcgctcccagccgcccgtggccctt

SEQ ID NO: 36870 - DNA, 25 bp, synthetic construct
  misc_feature 1..25: note = Oligonucleotide
  source 1..25: mol_type = other DNA
ccagcgctcccagccgcccgtggcc

SEQ ID NO: 36871 - DNA, 25 bp, synthetic construct
  misc_feature 1..25: note = Oligonucleotide
  source 1..25: mol_type = other DNA
gacccagcgctcccagccgcccgtg

SEQ ID NO: 36872 - DNA, 25 bp, synthetic construct
  misc_feature 1..25: note = Oligonucleotide
  source 1..25: mol_type = other DNA
cccgacccagcgctcccagccgccc

SEQ ID NO: 36873 - DNA, 25 bp, synthetic construct
  misc_feature 1..25: note = Oligonucleotide
  source 1..25: mol_type = other DNA
ctgcccgacccagcgctcccagccg

SEQ ID NO: 36874 - DNA, 25 bp, synthetic construct
  misc_feature 1..25: note = Oligonucleotide
  source 1..25: mol_type = other DNA
tgcctgcccgacccagcgctcccag

SEQ ID NO: 36875 - DNA, 25 bp, synthetic construct
  misc_feature 1..25: note = Oligonucleotide
  source 1..25: mol_type = other DNA
ccatgcctgcccgacccagcgctcc

SEQ ID NO: 36876 - DNA, 25 bp, synthetic construct
  misc_feature 1..25: note = Oligonucleotide
  source 1..25: mol_type = other DNA
cccccatgcctgcccgacccagcgc

SEQ ID NO: 36877 - DNA, 25 bp, synthetic construct
  misc_feature 1..25: note = Oligonucleotide
  source 1..25: mol_type = other DNA
tgacccccatgcctgcccgacccag

SEQ ID NO: 36878 - DNA, 25 bp, synthetic construct
  misc_feature 1..25: note = Oligonucleotide
  source 1..25: mol_type = other DNA
gtctgacccccatgcctgcccgacc

SEQ ID NO: 36879 - DNA, 25 bp, synthetic construct
  misc_feature 1..25: note = Oligonucleotide
  source 1..25: mol_type = other DNA
acagtctgacccccatgcctgcccg

SEQ ID NO: 36880 - DNA, 25 bp, synthetic construct
  misc_feature 1..25: note = Oligonucleotide
  source 1..25: mol_type = other DNA
aggacagtctgacccccatgcctgc

SEQ ID NO: 36881 - DNA, 25 bp, synthetic construct
  misc_feature 1..25: note = Oligonucleotide
  source 1..25: mol_type = other DNA
cccaggacagtctgacccccatgcc

SEQ ID NO: 36882 - DNA, 25 bp, synthetic construct
  misc_feature 1..25: note = Oligonucleotide
  source 1..25: mol_type = other DNA
gggcccaggacagtctgacccccat

SEQ ID NO: 36883 - DNA, 25 bp, synthetic construct
  misc_feature 1..25: note = Oligonucleotide
  source 1..25: mol_type = other DNA
agagggcccaggacagtctgacccc

SEQ ID NO: 36884 - DNA, 25 bp, synthetic construct
  misc_feature 1..25: note = Oligonucleotide
  source 1..25: mol_type = other DNA
tcaagagggcccaggacagtctgac

SEQ ID NO: 36885 - DNA, 25 bp, synthetic construct
  misc_feature 1..25: note = Oligonucleotide
  source 1..25: mol_type = other DNA
ccgtcaagagggcccaggacagtct

SEQ ID NO: 36886 - DNA, 25 bp, synthetic construct
  misc_feature 1..25: note = Oligonucleotide
  source 1..25: mol_type = other DNA
cctccgtcaagagggcccaggacag

SEQ ID NO: 36887 - DNA, 25 bp, synthetic construct
  misc_feature 1..25: note = Oligonucleotide
  source 1..25: mol_type = other DNA
tcacctccgtcaagagggcccagga

SEQ ID NO: 36888 - DNA, 25 bp, synthetic construct
  misc_feature 1..25: note = Oligonucleotide
  source 1..25: mol_type = other DNA
ctctcacctccgtcaagagggccca

SEQ ID NO: 36889 - DNA, 25 bp, synthetic construct
  misc_feature 1..25: note = Oligonucleotide
  source 1..25: mol_type = other DNA
aggctctcacctccgtcaagagggc

SEQ ID NO: 36890 - DNA, 25 bp, synthetic construct
  misc_feature 1..25: note = Oligonucleotide
  source 1..25: mol_type = other DNA
gataggctctcacctccgtcaagag

SEQ ID NO: 36891 - DNA, 25 bp, synthetic construct
  misc_feature 1..25: note = Oligonucleotide
  source 1..25: mol_type = other DNA
catgataggctctcacctccgtcaa

SEQ ID NO: 36892 - DNA, 25 bp, synthetic construct
  misc_feature 1..25: note = Oligonucleotide
  source 1..25: mol_type = other DNA
ccacatgataggctctcacctccgt

SEQ ID NO: 36893 - DNA, 25 bp, synthetic construct
  misc_feature 1..25: note = Oligonucleotide
  source 1..25: mol_type = other DNA
ggtccacatgataggctctcacctc

SEQ ID NO: 36894 - DNA, 25 bp, synthetic construct
  misc_feature 1..25: note = Oligonucleotide
  source 1..25: mol_type = other DNA
aggggtccacatgataggctctcac

SEQ ID NO: 36895 - DNA, 25 bp, synthetic construct
  misc_feature 1..25: note = Oligonucleotide
  source 1..25: mol_type = other DNA
gagaggggtccacatgataggctct

SEQ ID NO: 36896 - DNA, 25 bp, synthetic construct
  misc_feature 1..25: note = Oligonucleotide
  source 1..25: mol_type = other DNA
ctggagaggggtccacatgataggc

SEQ ID NO: 36897 - DNA, 25 bp, synthetic construct
  misc_feature 1..25: note = Oligonucleotide
  source 1..25: mol_type = other DNA
cctctggagaggggtccacatgata

SEQ ID NO: 36898 - DNA, 25 bp, synthetic construct
  misc_feature 1..25: note = Oligonucleotide
  source 1..25: mol_type = other DNA
acccctctggagaggggtccacatg

SEQ ID NO: 36899 - DNA, 25 bp, synthetic construct
  misc_feature 1..25: note = Oligonucleotide
  source 1..25: mol_type = other DNA
cacacccctctggagaggggtccac

SEQ ID NO: 36900 - DNA, 25 bp, synthetic construct
  misc_feature 1..25: note = Oligonucleotide
  source 1..25: mol_type = other DNA
gcacacacccctctggagaggggtc

SEQ ID NO: 36901 - DNA, 25 bp, synthetic construct
  misc_feature 1..25: note = Oligonucleotide
  source 1..25: mol_type = other DNA
ggtgcacacacccctctggagaggg

SEQ ID NO: 36902 - DNA, 25 bp, synthetic construct
  misc_feature 1..25: note = Oligonucleotide
  source 1..25: mol_type = other DNA
tggggtgcacacacccctctggaga

SEQ ID NO: 36903 - DNA, 25 bp, synthetic construct
  misc_feature 1..25: note = Oligonucleotide
  source 1..25: mol_type = other DNA
ccatggggtgcacacacccctctgg

SEQ ID NO: 36904 - DNA, 25 bp, synthetic construct
  misc_feature 1..25: note = Oligonucleotide
  source 1..25: mol_type = other DNA
aggccatggggtgcacacacccctc

SEQ ID NO: 36905 - DNA, 25 bp, synthetic construct
  misc_feature 1..25: note = Oligonucleotide
  source 1..25: mol_type = other DNA
gagaggccatggggtgcacacaccc

SEQ ID NO: 36906 - DNA, 25 bp, synthetic construct
  misc_feature 1..25: note = Oligonucleotide
  source 1..25: mol_type = other DNA
tgagagaggccatggggtgcacaca

SEQ ID NO: 36907 - DNA, 25 bp, synthetic construct
  misc_feature 1..25: note = Oligonucleotide
  source 1..25: mol_type = other DNA
ctctgagagaggccatggggtgcac

SEQ ID NO: 36908 - DNA, 25 bp, synthetic construct
  misc_feature 1..25: note = Oligonucleotide
  source 1..25: mol_type = other DNA
agtctctgagagaggccatggggtg

SEQ ID NO: 36909 - DNA, 25 bp, synthetic construct
  misc_feature 1..25: note = Oligonucleotide
  source 1..25: mol_type = other DNA
aagagtctctgagagaggccatggg

SEQ ID NO: 36910 - DNA, 25 bp, synthetic construct
  misc_feature 1..25: note = Oligonucleotide
  source 1..25: mol_type = other DNA
cccaagagtctctgagagaggccat

SEQ ID NO: 36911 - DNA, 25 bp, synthetic construct
  misc_feature 1..25: note = Oligonucleotide
  source 1..25: mol_type = other DNA
agccccaagagtctctgagagaggc

SEQ ID NO: 36912 - DNA, 25 bp, synthetic construct
  misc_feature 1..25: note = Oligonucleotide
  source 1..25: mol_type = other DNA
gacagccccaagagtctctgagaga

SEQ ID NO: 36913 - DNA, 25 bp, synthetic construct
  misc_feature 1..25: note = Oligonucleotide
  source 1..25: mol_type = other DNA
agagacagccccaagagtctctgag

SEQ ID NO: 36914 - DNA, 25 bp, synthetic construct
  misc_feature 1..25: note = Oligonucleotide
  source 1..25: mol_type = other DNA
ggcagagacagccccaagagtctct

SEQ ID NO: 36915 - DNA, 25 bp, synthetic construct
  misc_feature 1..25: note = Oligonucleotide
  source 1..25: mol_type = other DNA
gggggcagagacagccccaagagtc

SEQ ID NO: 36916 - DNA, 25 bp, synthetic construct
  misc_feature 1..25: note = Oligonucleotide
  source 1..25: mol_type = other DNA
ttagggggcagagacagccccaaga

SEQ ID NO: 36917 - DNA, 25 bp, synthetic construct
  misc_feature 1..25: note = Oligonucleotide
  source 1..25: mol_type = other DNA
catttagggggcagagacagcccca

SEQ ID NO: 36918 - DNA, 25 bp, synthetic construct
  misc_feature 1..25: note = Oligonucleotide
  source 1..25: mol_type = other DNA
ggccatttagggggcagagacagcc

SEQ ID NO: 36919 - DNA, 25 bp, synthetic construct
  misc_feature 1..25: note = Oligonucleotide
  source 1..25: mol_type = other DNA
tgtggccatttagggggcagagaca

SEQ ID NO: 36920 - DNA, 25 bp, synthetic construct
  misc_feature 1..25: note = Oligonucleotide
  source 1..25: mol_type = other DNA
agctgtggccatttagggggcagag

SEQ ID NO: 36921 - DNA, 25 bp, synthetic construct
  misc_feature 1..25: note = Oligonucleotide
  source 1..25: mol_type = other DNA
ctgagctgtggccatttagggggca

SEQ ID NO: 36922 - DNA, 25 bp, synthetic construct
  misc_feature 1..25: note = Oligonucleotide
  source 1..25: mol_type = other DNA
gtgctgagctgtggccatttagggg

SEQ ID NO: 36923 - DNA, 25 bp, synthetic construct
  misc_feature 1..25: note = Oligonucleotide
  source 1..25: mol_type = other DNA
caggtgctgagctgtggccatttag

SEQ ID NO: 36924 - DNA, 25 bp, synthetic construct
  misc_feature 1..25: note = Oligonucleotide
  source 1..25: mol_type = other DNA
cagcaggtgctgagctgtggccatt

SEQ ID NO: 36925 - DNA, 25 bp, synthetic construct
  misc_feature 1..25: note = Oligonucleotide
  source 1..25: mol_type = other DNA
acccagcaggtgctgagctgtggcc

SEQ ID NO: 36926 - DNA, 25 bp, synthetic construct
  misc_feature 1..25: note = Oligonucleotide
  source 1..25: mol_type = other DNA
caaacccagcaggtgctgagctgtg

SEQ ID NO: 36927 - DNA, 25 bp, synthetic construct
  misc_feature 1..25: note = Oligonucleotide
  source 1..25: mol_type = other DNA
gagcaaacccagcaggtgctgagct

SEQ ID NO: 36928 - DNA, 25 bp, synthetic construct
  misc_feature 1..25: note = Oligonucleotide
  source 1..25: mol_type = other DNA
caagagcaaacccagcaggtgctga

SEQ ID NO: 36929 - DNA, 25 bp, synthetic construct
  misc_feature 1..25: note = Oligonucleotide
  source 1..25: mol_type = other DNA
ctacaagagcaaacccagcaggtgc

SEQ ID NO: 36930 - DNA, 25 bp, synthetic construct
  misc_feature 1..25: note = Oligonucleotide
  source 1..25: mol_type = other DNA
aagctacaagagcaaacccagcagg

SEQ ID NO: 36931 - DNA, 25 bp, synthetic construct
  misc_feature 1..25: note = Oligonucleotide
  source 1..25: mol_type = other DNA
caaaagctacaagagcaaacccagc

SEQ ID NO: 36932 - DNA, 25 bp, synthetic construct
  misc_feature 1..25: note = Oligonucleotide
  source 1..25: mol_type = other DNA
caccaaaagctacaagagcaaaccc

SEQ ID NO: 36933 - DNA, 25 bp, synthetic construct
  misc_feature 1..25: note = Oligonucleotide
  source 1..25: mol_type = other DNA
aggcaccaaaagctacaagagcaaa

SEQ ID NO: 36934 - DNA, 25 bp, synthetic construct
  misc_feature 1..25: note = Oligonucleotide
  source 1..25: mol_type = other DNA
cagaggcaccaaaagctacaagagc

SEQ ID NO: 36935 - DNA, 25 bp, synthetic construct
  misc_feature 1..25: note = Oligonucleotide
  source 1..25: mol_type = other DNA
aggcagaggcaccaaaagctacaag

SEQ ID NO: 36936 - DNA, 25 bp, synthetic construct
  misc_feature 1..25: note = Oligonucleotide
  source 1..25: mol_type = other DNA
tgaaggcagaggcaccaaaagctac

SEQ ID NO: 36937 - DNA, 25 bp, synthetic construct
  misc_feature 1..25: note = Oligonucleotide
  source 1..25: mol_type = other DNA
gcctgaaggcagaggcaccaaaagc

SEQ ID NO: 36938 - DNA, 25 bp, synthetic construct
  misc_feature 1..25: note = Oligonucleotide
  source 1..25: mol_type = other DNA
actgcctgaaggcagaggcaccaaa

SEQ ID NO: 36939 - DNA, 25 bp, synthetic construct
  misc_feature 1..25: note = Oligonucleotide
  source 1..25: mol_type = other DNA
gggactgcctgaaggcagaggcacc

SEQ ID NO: 36940 - DNA, 25 bp, synthetic construct
  misc_feature 1..25: note = Oligonucleotide
  source 1..25: mol_type = other DNA
acagggactgcctgaaggcagaggc

SEQ ID NO: 36941 - DNA, 25 bp, synthetic construct
  misc_feature 1..25: note = Oligonucleotide
  source 1..25: mol_type = other DNA
gagacagggactgcctgaaggcaga

SEQ ID NO: 36942 - DNA, 25 bp, synthetic construct
  misc_feature 1..25: note = Oligonucleotide
  source 1..25: mol_type = other DNA
cgtgagacagggactgcctgaaggc

SEQ ID NO: 36943 - DNA, 25 bp, synthetic construct
  misc_feature 1..25: note = Oligonucleotide
  source 1..25: mol_type = other DNA
aggcgtgagacagggactgcctgaa

SEQ ID NO: 36944 - DNA, 25 bp, synthetic construct
  misc_feature 1..25: note = Oligonucleotide
  source 1..25: mol_type = other DNA
ctcaggcgtgagacagggactgcct

SEQ ID NO: 36945 - DNA, 25 bp, synthetic construct
  misc_feature 1..25: note = Oligonucleotide
  source 1..25: mol_type = other DNA
ggtctcaggcgtgagacagggactg

SEQ ID NO: 36946 - DNA, 25 bp, synthetic construct
  misc_feature 1..25: note = Oligonucleotide
  source 1..25: mol_type = other DNA
ggtggtctcaggcgtgagacaggga

SEQ ID NO: 36947 - DNA, 25 bp, synthetic construct
  misc_feature 1..25: note = Oligonucleotide
  source 1..25: mol_type = other DNA
cttggtggtctcaggcgtgagacag

SEQ ID NO: 36948 - DNA, 25 bp, synthetic construct
  misc_feature 1..25: note = Oligonucleotide
  source 1..25: mol_type = other DNA
taccttggtggtctcaggcgtgaga

SEQ ID NO: 36949 - DNA, 25 bp, synthetic construct
  misc_feature 1..25: note = Oligonucleotide
  source 1..25: mol_type = other DNA
gggtaccttggtggtctcaggcgtg

SEQ ID NO: 36950 - DNA, 25 bp, synthetic construct
  misc_feature 1..25: note = Oligonucleotide
  source 1..25: mol_type = other DNA
ctggggtaccttggtggtctcaggc

SEQ ID NO: 36951 - DNA, 25 bp, synthetic construct
  misc_feature 1..25: note = Oligonucleotide
  source 1..25: mol_type = other DNA
gagctggggtaccttggtggtctca

SEQ ID NO: 36952 - DNA, 25 bp, synthetic construct
  misc_feature 1..25: note = Oligonucleotide
  source 1..25: mol_type = other DNA
gcggagctggggtaccttggtggtc

SEQ ID NO: 36953 - DNA, 25 bp, synthetic construct
  misc_feature 1..25: note = Oligonucleotide
  source 1..25: mol_type = other DNA
tcagcggagctggggtaccttggtg

SEQ ID NO: 36954 - DNA, 25 bp, synthetic construct
  misc_feature 1..25: note = Oligonucleotide
  source 1..25: mol_type = other DNA
ttctcagcggagctggggtaccttg

SEQ ID NO: 36955 - DNA, 25 bp, synthetic construct
  misc_feature 1..25: note = Oligonucleotide
  source 1..25: mol_type = other DNA
gtgttctcagcggagctggggtacc

SEQ ID NO: 36956 - DNA, 25 bp, synthetic construct
  misc_feature 1..25: note = Oligonucleotide
  source 1..25: mol_type = other DNA
gtcgtgttctcagcggagctggggt

SEQ ID NO: 36957 - DNA, 25 bp, synthetic construct
  misc_feature 1..25: note = Oligonucleotide
  source 1..25: mol_type = other DNA
tttgtcgtgttctcagcggagctgg

SEQ ID NO: 36958 - DNA, 25 bp, synthetic construct
  misc_feature 1..25: note = Oligonucleotide
  source 1..25: mol_type = other DNA
tgctttgtcgtgttctcagcggagc

SEQ ID NO: 36959 - DNA, 25 bp, synthetic construct
  misc_feature 1..25: note = Oligonucleotide
  source 1..25: mol_type = other DNA
acatgctttgtcgtgttctcagcgg

SEQ ID NO: 36960 - DNA, 25 bp, synthetic construct
  misc_feature 1..25: note = Oligonucleotide
  source 1..25: mol_type = other DNA
gagacatgctttgtcgtgttctcag

SEQ ID NO: 36961 - DNA, 25 bp, synthetic construct
  misc_feature 1..25: note = Oligonucleotide
  source 1..25: mol_type = other DNA
acagagacatgctttgtcgtgttct

SEQ ID NO: 36962 - DNA, 25 bp, synthetic construct
  misc_feature 1..25: note = Oligonucleotide
  source 1..25: mol_type = other DNA
ggaacagagacatgctttgtcgtgt

SEQ ID NO: 36963 - DNA, 25 bp, synthetic construct
  misc_feature 1..25: note = Oligonucleotide
  source 1..25: mol_type = other DNA
cagggaacagagacatgctttgtcg

SEQ ID NO: 36964 - DNA, 25 bp, synthetic construct
  misc_feature 1..25: note = Oligonucleotide
  source 1..25: mol_type = other DNA
gggcagggaacagagacatgctttg

SEQ ID NO: 36965 - DNA, 25 bp, synthetic construct
  misc_feature 1..25: note = Oligonucleotide
  source 1..25: mol_type = other DNA
agtgggcagggaacagagacatgct

SEQ ID NO: 36966 - DNA, 25 bp, synthetic construct
  misc_feature 1..25: note = Oligonucleotide
  source 1..25: mol_type = other DNA
gcaagtgggcagggaacagagacat

SEQ ID NO: 36967 - DNA, 25 bp, synthetic construct
  misc_feature 1..25: note = Oligonucleotide
  source 1..25: mol_type = other DNA
ttggcaagtgggcagggaacagaga

SEQ ID NO: 36968 - DNA, 25 bp, synthetic construct
  misc_feature 1..25: note = Oligonucleotide
  source 1..25: mol_type = other DNA
gggttggcaagtgggcagggaacag

SEQ ID NO: 36969 - DNA, 25 bp, synthetic construct
  misc_feature 1..25: note = Oligonucleotide
  source 1..25: mol_type = other DNA
gccgggttggcaagtgggcagggaa

SEQ ID NO: 36970 - DNA, 25 bp, synthetic construct
  misc_feature 1..25: note = Oligonucleotide
  source 1..25: mol_type = other DNA
ggcgccgggttggcaagtgggcagg

SEQ ID NO: 36971 - DNA, 25 bp, synthetic construct
  misc_feature 1..25: note = Oligonucleotide
  source 1..25: mol_type = other DNA
gaaggcgccgggttggcaagtgggc

SEQ ID NO: 36972 - DNA, 25 bp, synthetic construct
  misc_feature 1..25: note = Oligonucleotide
  source 1..25: mol_type = other DNA
ctagaaggcgccgggttggcaagtg

SEQ ID NO: 36973 - DNA, 25 bp, synthetic construct
  misc_feature 1..25: note = Oligonucleotide
  source 1..25: mol_type = other DNA
agcctagaaggcgccgggttggcaa

SEQ ID NO: 36974 - DNA, 25 bp, synthetic construct
  misc_feature 1..25: note = Oligonucleotide
  source 1..25: mol_type = other DNA
aggagcctagaaggcgccgggttgg

SEQ ID NO: 36975 - DNA, 25 bp, synthetic construct
  misc_feature 1..25: note = Oligonucleotide
  source 1..25: mol_type = other DNA
gggaggagcctagaaggcgccgggt

SEQ ID NO: 36976 - DNA, 25 bp, synthetic construct
  misc_feature 1..25: note = Oligonucleotide
  source 1..25: mol_type = other DNA
tgggggaggagcctagaaggcgccg

SEQ ID NO: 36977 - DNA, 25 bp, synthetic construct
  misc_feature 1..25: note = Oligonucleotide
  source 1..25: mol_type = other DNA
gggtgggggaggagcctagaaggcg

SEQ ID NO: 36978 - DNA, 25 bp, synthetic construct
  misc_feature 1..25: note = Oligonucleotide
  source 1..25: mol_type = other DNA
tgagggtgggggaggagcctagaag

SEQ ID NO: 36979 - DNA, 25 bp, synthetic construct
  misc_feature 1..25: note = Oligonucleotide
  source 1..25: mol_type = other DNA
gggtgagggtgggggaggagcctag

SEQ ID NO: 36980 - DNA, 25 bp, synthetic construct
  misc_feature 1..25: note = Oligonucleotide
  source 1..25: mol_type = other DNA
cctgggtgagggtgggggaggagcc

SEQ ID NO: 36981 - DNA, 25 bp, synthetic construct
  misc_feature 1..25: note = Oligonucleotide
  source 1..25: mol_type = other DNA
gaccctgggtgagggtgggggagga

SEQ ID NO: 36982 - DNA, 25 bp, synthetic construct
  misc_feature 1..25: note = Oligonucleotide
  source 1..25: mol_type = other DNA
gccgaccctgggtgagggtggggga

SEQ ID NO: 36983 - DNA, 25 bp, synthetic construct
  misc_feature 1..25: note = Oligonucleotide
  source 1..25: mol_type = other DNA
ctggccgaccctgggtgagggtggg

SEQ ID NO: 36984 - DNA, 25 bp, synthetic construct
  misc_feature 1..25: note = Oligonucleotide
  source 1..25: mol_type = other DNA
accctggccgaccctgggtgagggt

SEQ ID NO: 36985 - DNA, 25 bp, synthetic construct
  misc_feature 1..25: note = Oligonucleotide
  source 1..25: mol_type = other DNA
cagaccctggccgaccctgggtgag

SEQ ID NO: 36986 - DNA, 25 bp, synthetic construct
  misc_feature 1..25: note = Oligonucleotide
  source 1..25: mol_type = other DNA
gtgcagaccctggccgaccctgggt

SEQ ID NO: 36987 - DNA, 25 bp, synthetic construct
  misc_feature 1..25: note = Oligonucleotide
  source 1..25: mol_type = other DNA
tgggtgcagaccctggccgaccctg

SEQ ID NO: 36988 - DNA, 25 bp, synthetic construct
  misc_feature 1..25: note = Oligonucleotide
  source 1..25: mol_type = other DNA
gggtgggtgcagaccctggccgacc

SEQ ID NO: 36989 - DNA, 25 bp, synthetic construct
  misc_feature 1..25: note = Oligonucleotide
  source 1..25: mol_type = other DNA
gcagggtgggtgcagaccctggccg

SEQ ID NO: 36990 - DNA, 25 bp, synthetic construct
  misc_feature 1..25: note = Oligonucleotide
  source 1..25: mol_type = other DNA
tgggcagggtgggtgcagaccctgg

SEQ ID NO: 36991 - DNA, 25 bp, synthetic construct
  misc_feature 1..25: note = Oligonucleotide
  source 1..25: mol_type = other DNA
tgttgggcagggtgggtgcagaccc

SEQ ID NO: 36992 - DNA, 25 bp, synthetic construct
  misc_feature 1..25: note = Oligonucleotide
  source 1..25: mol_type = other DNA
cggtgttgggcagggtgggtgcaga

SEQ ID NO: 36993 - DNA, 25 bp, synthetic construct
  misc_feature 1..25: note = Oligonucleotide
  source 1..25: mol_type = other DNA
agacggtgttgggcagggtgggtgc

SEQ ID NO: 36994 - DNA, 25 bp, synthetic construct
  misc_feature 1..25: note = Oligonucleotide
  source 1..25: mol_type = other DNA
tgtagacggtgttgggcagggtggg

SEQ ID NO: 36995 - DNA, 25 bp, synthetic construct
  misc_feature 1..25: note = Oligonucleotide
  source 1..25: mol_type = other DNA
cagtgtagacggtgttgggcagggt

SEQ ID NO: 36996 - DNA, 25 bp, synthetic construct
  misc_feature 1..25: note = Oligonucleotide
  source 1..25: mol_type = other DNA
gtacagtgtagacggtgttgggcag

SEQ ID NO: 36997 - DNA, 25 bp, synthetic construct
  misc_feature 1..25: note = Oligonucleotide
  source 1..25: mol_type = other DNA
gtggtacagtgtagacggtgttggg

SEQ ID NO: 36998 - DNA, 25 bp, synthetic construct
  misc_feature 1..25: note = Oligonucleotide
  source 1..25: mol_type = other DNA
atggtggtacagtgtagacggtgtt

SEQ ID NO: 36999 - DNA, 25 bp, synthetic construct
  misc_feature 1..25: note = Oligonucleotide
  source 1..25: mol_type = other DNA
cagatggtggtacagtgtagacggt

SEQ ID NO: 37000 - DNA, 25 bp, synthetic construct
  misc_feature 1..25: note = Oligonucleotide
  source 1..25: mol_type = other DNA
gtgcagatggtggtacagtgtagac

SEQ ID NO: 37001 - DNA, 25 bp, synthetic construct
  misc_feature 1..25: note = Oligonucleotide
  source 1..25: mol_type = other DNA
gcagtgcagatggtggtacagtgta

SEQ ID NO: 37002 - DNA, 25 bp, synthetic construct
  misc_feature 1..25: note = Oligonucleotide
  source 1..25: mol_type = other DNA
tgggcagtgcagatggtggtacagt

SEQ ID NO: 37003 - DNA, 25 bp, synthetic construct
  misc_feature 1..25: note = Oligonucleotide
  source 1..25: mol_type = other DNA
gtgtgggcagtgcagatggtggtac

SEQ ID NO: 37004 - DNA, 25 bp, synthetic construct
  misc_feature 1..25: note = Oligonucleotide
  source 1..25: mol_type = other DNA
gctgtgtgggcagtgcagatggtgg

SEQ ID NO: 37005 - DNA, 25 bp, synthetic construct
  misc_feature 1..25: note = Oligonucleotide
  source 1..25: mol_type = other DNA
tgggctgtgtgggcagtgcagatgg

SEQ ID NO: 37006 - DNA, 25 bp, synthetic construct
  misc_feature 1..25: note = Oligonucleotide
  source 1..25: mol_type = other DNA
gcctgggctgtgtgggcagtgcaga

SEQ ID NO: 37007 - DNA, 25 bp, synthetic construct
  misc_feature 1..25: note = Oligonucleotide
  source 1..25: mol_type = other DNA
ggagcctgggctgtgtgggcagtgc

SEQ ID NO: 37008 - DNA, 25 bp, synthetic construct
  misc_feature 1..25: note = Oligonucleotide
  source 1..25: mol_type = other DNA
attggagcctgggctgtgtgggcag

SEQ ID NO: 37009 - DNA, 25 bp, synthetic construct
  misc_feature 1..25: note = Oligonucleotide
  source 1..25: mol_type = other DNA
cccattggagcctgggctgtgtggg

SEQ ID NO: 37010 - DNA, 25 bp, synthetic construct
  misc_feature 1..25: note = Oligonucleotide
  source 1..25: mol_type = other DNA
cagcccattggagcctgggctgtgt

SEQ ID NO: 37011 - DNA, 25 bp, synthetic construct
  misc_feature 1..25: note = Oligonucleotide
  source 1..25: mol_type = other DNA
atgcagcccattggagcctgggctg

SEQ ID NO: 37012 - DNA, 25 bp, synthetic construct
  misc_feature 1..25: note = Oligonucleotide
  source 1..25: mol_type = other DNA
aggatgcagcccattggagcctggg

SEQ ID NO: 37013 - DNA, 25 bp, synthetic construct
  misc_feature 1..25: note = Oligonucleotide
  source 1..25: mol_type = other DNA
cagaggatgcagcccattggagcct

SEQ ID NO: 37014 - DNA, 25 bp, synthetic construct
  misc_feature 1..25: note = Oligonucleotide
  source 1..25: mol_type = other DNA
gagcagaggatgcagcccattggag

SEQ ID NO: 37015 - DNA, 25 bp, synthetic construct
  misc_feature 1..25: note = Oligonucleotide
  source 1..25: mol_type = other DNA
agggagcagaggatgcagcccattg

SEQ ID NO: 37016 - DNA, 25 bp, synthetic construct
  misc_feature 1..25: note = Oligonucleotide
  source 1..25: mol_type = other DNA
ctcagggagcagaggatgcagccca

SEQ ID NO: 37017 - DNA, 25 bp, synthetic construct
  misc_feature 1..25: note = Oligonucleotide
  source 1..25: mol_type = other DNA
gccctcagggagcagaggatgcagc

SEQ ID NO: 37018 - DNA, 25 bp, synthetic construct
  misc_feature 1..25: note = Oligonucleotide
  source 1..25: mol_type = other DNA
tctgccctcagggagcagaggatgc

SEQ ID NO: 37019 - DNA, 25 bp, synthetic construct
  misc_feature 1..25: note = Oligonucleotide
  source 1..25: mol_type = other DNA
gactctgccctcagggagcagagga

SEQ ID NO: 37020 - DNA, 25 bp, synthetic construct
  misc_feature 1..25: note = Oligonucleotide
  source 1..25: mol_type = other DNA
ctggactctgccctcagggagcaga

SEQ ID NO: 37021 - DNA, 25 bp, synthetic construct
  misc_feature 1..25: note = Oligonucleotide
  source 1..25: mol_type = other DNA
cgtctggactctgccctcagggagc

SEQ ID NO: 37022 - DNA, 25 bp, synthetic construct
  misc_feature 1..25: note = Oligonucleotide
  source 1..25: mol_type = other DNA
tcacgtctggactctgccctcaggg

SEQ ID NO: 37023 - DNA, 25 bp, synthetic construct
  misc_feature 1..25: note = Oligonucleotide
  source 1..25: mol_type = other DNA
gaatcacgtctggactctgccctca

SEQ ID NO: 37024 - DNA, 25 bp, synthetic construct
  misc_feature 1..25: note = Oligonucleotide
  source 1..25: mol_type = other DNA
caggaatcacgtctggactctgccc

SEQ ID NO: 37025 - DNA, 25 bp, synthetic construct
  misc_feature 1..25: note = Oligonucleotide
  source 1..25: mol_type = other DNA
acccaggaatcacgtctggactctg

SEQ ID NO: 37026 - DNA, 25 bp, synthetic construct
  misc_feature 1..25: note = Oligonucleotide
  source 1..25: mol_type = other DNA
tggacccaggaatcacgtctggact

SEQ ID NO: 37027 - DNA, 25 bp, synthetic construct
  misc_feature 1..25: note = Oligonucleotide
  source 1..25: mol_type = other DNA
gcctggacccaggaatcacgtctgg

SEQ ID NO: 37028 - DNA, 25 bp, synthetic construct
  misc_feature 1..25: note = Oligonucleotide
  source 1..25: mol_type = other DNA
ggtgcctggacccaggaatcacgtc

SEQ ID NO: 37029 - DNA, 25 bp, synthetic construct
  misc_feature 1..25: note = Oligonucleotide
  source 1..25: mol_type = other DNA
gtgggtgcctggacccaggaatcac

SEQ ID NO: 37030 - DNA, 25 bp, synthetic construct
  misc_feature 1..25: note = Oligonucleotide
  source 1..25: mol_type = other DNA
cctgtgggtgcctggacccaggaat

SEQ ID NO: 37031 - DNA, 25 bp, synthetic construct
  misc_feature 1..25: note = Oligonucleotide
  source 1..25: mol_type = other DNA
gtgcctgtgggtgcctggacccagg

SEQ ID NO: 37032 - DNA, 25 bp, synthetic construct
  misc_feature 1..25: note = Oligonucleotide
  source 1..25: mol_type = other DNA
ctagtgcctgtgggtgcctggaccc

SEQ ID NO: 37033 - DNA, 25 bp, synthetic construct
  misc_feature 1..25: note = Oligonucleotide
  source 1..25: mol_type = other DNA
gcactagtgcctgtgggtgcctgga

SEQ ID NO: 37034 - DNA, 25 bp, synthetic construct
  misc_feature 1..25: note = Oligonucleotide
  source 1..25: mol_type = other DNA
atggcactagtgcctgtgggtgcct

SEQ ID NO: 37035 - DNA, 25 bp, synthetic construct
  misc_feature 1..25: note = Oligonucleotide
  source 1..25: mol_type = other DNA
ccaatggcactagtgcctgtgggtg

SEQ ID NO: 37036 - DNA, 25 bp, synthetic construct
  misc_feature 1..25: note = Oligonucleotide
  source 1..25: mol_type = other DNA
actccaatggcactagtgcctgtgg

SEQ ID NO: 37037 - DNA, 25 bp, synthetic construct
  misc_feature 1..25: note = Oligonucleotide
  source 1..25: mol_type = other DNA
ctcactccaatggcactagtgcctg

SEQ ID NO: 37038 - DNA, 25 bp, synthetic construct
  misc_feature 1..25: note = Oligonucleotide
  source 1..25: mol_type = other DNA
gctctcactccaatggcactagtgc

SEQ ID NO: 37039 - DNA, 25 bp, synthetic construct
  misc_feature 1..25: note = Oligonucleotide
  source 1..25: mol_type = other DNA
cacgctctcactccaatggcactag

SEQ ID NO: 37040 - DNA, 25 bp, synthetic construct
  misc_feature 1..25: note = Oligonucleotide
  source 1..25: mol_type = other DNA
ccccacgctctcactccaatggcac

SEQ ID NO: 37041 - DNA, 25 bp, synthetic construct
  misc_feature 1..25: note = Oligonucleotide
  source 1..25: mol_type = other DNA
acaccccacgctctcactccaatgg

SEQ ID NO: 37042 - DNA, 25 bp, synthetic construct
  misc_feature 1..25: note = Oligonucleotide
  source 1..25: mol_type = other DNA
gagacaccccacgctctcactccaa

SEQ ID NO: 37043 - DNA, 25 bp, synthetic construct
  misc_feature 1..25: note = Oligonucleotide
  source 1..25: mol_type = other DNA
ggtgagacaccccacgctctcactc

SEQ ID NO: 37044 - DNA, 25 bp, synthetic construct
  misc_feature 1..25: note = Oligonucleotide
  source 1..25: mol_type = other DNA
agaggtgagacaccccacgctctca

SEQ ID NO: 37045 - DNA, 25 bp, synthetic construct
  misc_feature 1..25: note = Oligonucleotide
  source 1..25: mol_type = other DNA
gccagaggtgagacaccccacgctc

SEQ ID NO: 37046 - DNA, 25 bp, synthetic construct
  misc_feature 1..25: note = Oligonucleotide
  source 1..25: mol_type = other DNA
taagccagaggtgagacaccccacg

SEQ ID NO: 37047 - DNA, 25 bp, synthetic construct
  misc_feature 1..25: note = Oligonucleotide
  source 1..25: mol_type = other DNA
tcctaagccagaggtgagacacccc

SEQ ID NO: 37048 - DNA, 25 bp, synthetic construct
  misc_feature 1..25: note = Oligonucleotide
  source 1..25: mol_type = other DNA
tcctcctaagccagaggtgagacac

SEQ ID NO: 37049 - DNA, 25 bp, synthetic construct
  misc_feature 1..25: note = Oligonucleotide
  source 1..25: mol_type = other DNA
tcctcctcctaagccagaggtgaga

SEQ ID NO: 37050 - DNA, 25 bp, synthetic construct
  misc_feature 1..25: note = Oligonucleotide
  source 1..25: mol_type = other DNA
cagtcctcctcctaagccagaggtg

SEQ ID NO: 37051 - DNA, 25 bp, synthetic construct
  misc_feature 1..25: note = Oligonucleotide
  source 1..25: mol_type = other DNA
ccccagtcctcctcctaagccagag

SEQ ID NO: 37052 - DNA, 25 bp, synthetic construct
  misc_feature 1..25: note = Oligonucleotide
  source 1..25: mol_type = other DNA
ggcccccagtcctcctcctaagcca

SEQ ID NO: 37053 - DNA, 25 bp, synthetic construct
  misc_feature 1..25: note = Oligonucleotide
  source 1..25: mol_type = other DNA
gggggcccccagtcctcctcctaag

SEQ ID NO: 37054 - DNA, 25 bp, synthetic construct
  misc_feature 1..25: note = Oligonucleotide
  source 1..25: mol_type = other DNA
actgggggcccccagtcctcctcct

SEQ ID NO: 37055 - DNA, 25 bp, synthetic construct
  misc_feature 1..25: note = Oligonucleotide
  source 1..25: mol_type = other DNA
ggcactgggggcccccagtcctcct

SEQ ID NO: 37056 - DNA, 25 bp, synthetic construct
  misc_feature 1..25: note = Oligonucleotide
  source 1..25: mol_type = other DNA
cagggcactgggggcccccagtcct

SEQ ID NO: 37057 - DNA, 25 bp, synthetic construct
  misc_feature 1..25: note = Oligonucleotide
  source 1..25: mol_type = other DNA
ttccagggcactgggggcccccagt

SEQ ID NO: 37058 - DNA, 25 bp, synthetic construct
  misc_feature 1..25: note = Oligonucleotide
  source 1..25: mol_type = other DNA
aggttccagggcactgggggccccc

SEQ ID NO: 37059 - DNA, 25 bp, synthetic construct
  misc_feature 1..25: note = Oligonucleotide
  source 1..25: mol_type = other DNA
tggaggttccagggcactgggggcc

SEQ ID NO: 37060 - DNA, 25 bp, synthetic construct
  misc_feature 1..25: note = Oligonucleotide
  source 1..25: mol_type = other DNA
atatggaggttccagggcactgggg

SEQ ID NO: 37061 - DNA, 25 bp, synthetic construct
  misc_feature 1..25: note = Oligonucleotide
  source 1..25: mol_type = other DNA
ggaatatggaggttccagggcactg

SEQ ID NO: 37062 - DNA, 25 bp, synthetic construct
  misc_feature 1..25: note = Oligonucleotide
  source 1..25: mol_type = other DNA
aggggaatatggaggttccagggca

SEQ ID NO: 37063 - DNA, 25 bp, synthetic construct
  misc_feature 1..25: note = Oligonucleotide
  source 1..25: mol_type = other DNA
gggaggggaatatggaggttccagg

SEQ ID NO: 37064 - DNA, 25 bp, synthetic construct
  misc_feature 1..25: note = Oligonucleotide
  source 1..25: mol_type = other DNA
tcagggaggggaatatggaggttcc

SEQ ID NO: 37065 - DNA, 25 bp, synthetic construct
  misc_feature 1..25: note = Oligonucleotide
  source 1..25: mol_type = other DNA
gggtcagggaggggaatatggaggt

SEQ ID NO: 37066 - DNA, 25 bp, synthetic construct
  misc_feature 1..25: note = Oligonucleotide
  source 1..25: mol_type = other DNA
tgggggtcagggaggggaatatgga

SEQ ID NO: 37067 - DNA, 25 bp, synthetic construct
  misc_feature 1..25: note = Oligonucleotide
  source 1..25: mol_type = other DNA
ctgtgggggtcagggaggggaatat

SEQ ID NO: 37068 - DNA, 25 bp, synthetic construct
  misc_feature 1..25: note = Oligonucleotide
  source 1..25: mol_type = other DNA
tgactgtgggggtcagggaggggaa

SEQ ID NO: 37069 - DNA, 25 bp, synthetic construct
  misc_feature 1..25: note = Oligonucleotide
  source 1..25: mol_type = other DNA
caatgactgtgggggtcagggaggg

SEQ ID NO: 37070 - DNA, 25 bp, synthetic construct
  misc_feature 1..25: note = Oligonucleotide
  source 1..25: mol_type = other DNA
aaacaatgactgtgggggtcaggga

SEQ ID NO: 37071 - DNA, 25 bp, synthetic construct
  misc_feature 1..25: note = Oligonucleotide
  source 1..25: mol_type = other DNA
ttcaaacaatgactgtgggggtcag

SEQ ID NO: 37072 - DNA, 25 bp, synthetic construct
  misc_feature 1..25: note = Oligonucleotide
  source 1..25: mol_type = other DNA
gcgttcaaacaatgactgtgggggt

SEQ ID NO: 37073 - DNA, 25 bp, synthetic construct
  misc_feature 1..25: note = Oligonucleotide
  source 1..25: mol_type = other DNA
ctggcgttcaaacaatgactgtggg

SEQ ID NO: 37074 - DNA, 25 bp, synthetic construct
  misc_feature 1..25: note = Oligonucleotide
  source 1..25: mol_type = other DNA
gccctggcgttcaaacaatgactgt

SEQ ID NO: 37075 - DNA, 25 bp, synthetic construct
  misc_feature 1..25: note = Oligonucleotide
  source 1..25: mol_type = other DNA
gaggccctggcgttcaaacaatgac

SEQ ID NO: 37076 - DNA, 25 bp, synthetic construct
  misc_feature 1..25: note = Oligonucleotide
  source 1..25: mol_type = other DNA
tgggaggccctggcgttcaaacaat

SEQ ID NO: 37077 - DNA, 25 bp, synthetic construct
  misc_feature 1..25: note = Oligonucleotide
  source 1..25: mol_type = other DNA
gcctgggaggccctggcgttcaaac

SEQ ID NO: 37078 - DNA, 25 bp, synthetic construct
  misc_feature 1..25: note = Oligonucleotide
  source 1..25: mol_type = other DNA
tgggcctgggaggccctggcgttca

SEQ ID NO: 37079 - DNA, 25 bp, synthetic construct
  misc_feature 1..25: note = Oligonucleotide
  source 1..25: mol_type = other DNA
ctctgggcctgggaggccctggcgt

SEQ ID NO: 37080 - DNA, 25 bp, synthetic construct
  misc_feature 1..25: note = Oligonucleotide
  source 1..25: mol_type = other DNA
cttctctgggcctgggaggccctgg

SEQ ID NO: 37081 - DNA, 25 bp, synthetic construct
  misc_feature 1..25: note = Oligonucleotide
  source 1..25: mol_type = other DNA
cagcttctctgggcctgggaggccc

SEQ ID NO: 37082 - DNA, 25 bp, synthetic construct
  misc_feature 1..25: note = Oligonucleotide
  source 1..25: mol_type = other DNA
cggcagcttctctgggcctgggagg

SEQ ID NO: 37083 - DNA, 25 bp, synthetic construct
  misc_feature 1..25: note = Oligonucleotide
  source 1..25: mol_type = other DNA
gcccggcagcttctctgggcctggg

SEQ ID NO: 37084 - DNA, 25 bp, synthetic construct
  misc_feature 1..25: note = Oligonucleotide
  source 1..25: mol_type = other DNA
ggagcccggcagcttctctgggcct

SEQ ID NO: 37085 - DNA, 25 bp, synthetic construct
  misc_feature 1..25: note = Oligonucleotide
  source 1..25: mol_type = other DNA
caaggagcccggcagcttctctggg

SEQ ID NO: 37086 - DNA, 25 bp, synthetic construct
  misc_feature 1..25: note = Oligonucleotide
  source 1..25: mol_type = other DNA
ccgcaaggagcccggcagcttctct

SEQ ID NO: 37087 - DNA, 25 bp, synthetic construct
  misc_feature 1..25: note = Oligonucleotide
  source 1..25: mol_type = other DNA
cttccgcaaggagcccggcagcttc

SEQ ID NO: 37088 - DNA, 25 bp, synthetic construct
  misc_feature 1..25: note = Oligonucleotide
  source 1..25: mol_type = other DNA
ccccttccgcaaggagcccggcagc

SEQ ID NO: 37089 - DNA, 25 bp, synthetic construct
  misc_feature 1..25: note = Oligonucleotide
  source 1..25: mol_type = other DNA
aatccccttccgcaaggagcccggc

SEQ ID NO: 37090 - DNA, 25 bp, synthetic construct
  misc_feature 1..25: note = Oligonucleotide
  source 1..25: mol_type = other DNA
tggaatccccttccgcaaggagccc

SEQ ID NO: 37091 - DNA, 25 bp, synthetic construct
  misc_feature 1..25: note = Oligonucleotide
  source 1..25: mol_type = other DNA
ccgtggaatccccttccgcaaggag

SEQ ID NO: 37092 - DNA, 25 bp, synthetic construct
  misc_feature 1..25: note = Oligonucleotide
  source 1..25: mol_type = other DNA
ggtccgtggaatccccttccgcaag

SEQ ID NO: 37093 - DNA, 25 bp, synthetic construct
  misc_feature 1..25: note = Oligonucleotide
  source 1..25: mol_type = other DNA
cttggtccgtggaatccccttccgc

SEQ ID NO: 37094 - DNA, 25 bp, synthetic construct
  misc_feature 1..25: note = Oligonucleotide
  source 1..25: mol_type = other DNA
agacttggtccgtggaatccccttc

SEQ ID NO: 37095 - DNA, 25 bp, synthetic construct
  misc_feature 1..25: note = Oligonucleotide
  source 1..25: mol_type = other DNA
tacagacttggtccgtggaatcccc

SEQ ID NO: 37096 - DNA, 25 bp, synthetic construct
  misc_feature 1..25: note = Oligonucleotide
  source 1..25: mol_type = other DNA
acctacagacttggtccgtggaatc

SEQ ID NO: 37097 - DNA, 25 bp, synthetic construct
  misc_feature 1..25: note = Oligonucleotide
  source 1..25: mol_type = other DNA
catacctacagacttggtccgtgga

SEQ ID NO: 37098 - DNA, 25 bp, synthetic construct
  misc_feature 1..25: note = Oligonucleotide
  source 1..25: mol_type = other DNA
agccatacctacagacttggtccgt

SEQ ID NO: 37099 - DNA, 25 bp, synthetic construct
  misc_feature 1..25: note = Oligonucleotide
  source 1..25: mol_type = other DNA
cgcagccatacctacagacttggtc

SEQ ID NO: 37100 - DNA, 25 bp, synthetic construct
  misc_feature 1..25: note = Oligonucleotide
  source 1..25: mol_type = other DNA
cagcgcagccatacctacagacttg

SEQ ID NO: 37101 - DNA, 25 bp, synthetic construct
  misc_feature 1..25: note = Oligonucleotide
  source 1..25: mol_type = other DNA
ccacagcgcagccatacctacagac

SEQ ID NO: 37102 - DNA, 25 bp, synthetic construct
  misc_feature 1..25: note = Oligonucleotide
  source 1..25: mol_type = other DNA
gccccacagcgcagccatacctaca

SEQ ID NO: 37103 - DNA, 25 bp, synthetic construct
  misc_feature 1..25: note = Oligonucleotide
  source 1..25: mol_type = other DNA
gcagccccacagcgcagccatacct

SEQ ID NO: 37104 - DNA, 25 bp, synthetic construct
  misc_feature 1..25: note = Oligonucleotide
  source 1..25: mol_type = other DNA
catgcagccccacagcgcagccata

SEQ ID NO: 37105 - DNA, 25 bp, synthetic construct
  misc_feature 1..25: note = Oligonucleotide
  source 1..25: mol_type = other DNA
ccccatgcagccccacagcgcagcc

SEQ ID NO: 37106 - DNA, 25 bp, synthetic construct
  misc_feature 1..25: note = Oligonucleotide
  source 1..25: mol_type = other DNA
ccaccccatgcagccccacagcgca

SEQ ID NO: 37107 - DNA, 25 bp, synthetic construct
  misc_feature 1..25: note = Oligonucleotide
  source 1..25: mol_type = other DNA
tccccaccccatgcagccccacagc

SEQ ID NO: 37108 - DNA, 25 bp, synthetic construct
  misc_feature 1..25: note = Oligonucleotide
  source 1..25: mol_type = other DNA
tcctccccaccccatgcagccccac

SEQ ID NO: 37109 - DNA, 25 bp, synthetic construct
  misc_feature 1..25: note = Oligonucleotide
  source 1..25: mol_type = other DNA
cgttcctccccaccccatgcagccc

SEQ ID NO: 37110 - DNA, 25 bp, synthetic construct
  misc_feature 1..25: note = Oligonucleotide
  source 1..25: mol_type = other DNA
ccccgttcctccccaccccatgcag

SEQ ID NO: 37111 - DNA, 25 bp, synthetic construct
  misc_feature 1..25: note = Oligonucleotide
  source 1..25: mol_type = other DNA
cagccccgttcctccccaccccatg

SEQ ID NO: 37112 - DNA, 25 bp, synthetic construct
  misc_feature 1..25: note = Oligonucleotide
  source 1..25: mol_type = other DNA
ccccagccccgttcctccccacccc

SEQ ID NO: 37113 - DNA, 25 bp, synthetic construct
  misc_feature 1..25: note = Oligonucleotide
  source 1..25: mol_type = other DNA
cggccccagccccgttcctccccac

SEQ ID NO: 37114 - DNA, 25 bp, synthetic construct
  misc_feature 1..25: note = Oligonucleotide
  source 1..25: mol_type = other DNA
tgccggccccagccccgttcctccc

SEQ ID NO: 37115 - DNA, 25 bp, synthetic construct
  misc_feature 1..25: note = Oligonucleotide
  source 1..25: mol_type = other DNA
ccctgccggccccagccccgttcct

SEQ ID NO: 37116 - DNA, 25 bp, synthetic construct
  misc_feature 1..25: note = Oligonucleotide
  source 1..25: mol_type = other DNA
ccaccctgccggccccagccccgtt

SEQ ID NO: 37117 - DNA, 25 bp, synthetic construct
  misc_feature 1..25: note = Oligonucleotide
  source 1..25: mol_type = other DNA
agtccaccctgccggccccagcccc

SEQ ID NO: 37118 - DNA, 25 bp, synthetic construct
  misc_feature 1..25: note = Oligonucleotide
  source 1..25: mol_type = other DNA
ccaagtccaccctgccggccccagc

SEQ ID NO: 37119 - DNA, 25 bp, synthetic construct
  misc_feature 1..25: note = Oligonucleotide
  source 1..25: mol_type = other DNA
aacccaagtccaccctgccggcccc

SEQ ID NO: 37120 - DNA, 25 bp, synthetic construct
  misc_feature 1..25: note = Oligonucleotide
  source 1..25: mol_type = other DNA
tcaaacccaagtccaccctgccggc

SEQ ID NO: 37121 - DNA, 25 bp, synthetic construct
  misc_feature 1..25: note = Oligonucleotide
  source 1..25: mol_type = other DNA
ccttcaaacccaagtccaccctgcc

SEQ ID NO: 37122 - DNA, 25 bp, synthetic construct
  misc_feature 1..25: note = Oligonucleotide
  source 1..25: mol_type = other DNA
tgtccttcaaacccaagtccaccct

SEQ ID NO: 37123 - DNA, 25 bp, synthetic construct
  misc_feature 1..25: note = Oligonucleotide
  source 1..25: mol_type = other DNA
cagtgtccttcaaacccaagtccac

SEQ ID NO: 37124 - DNA, 25 bp, synthetic construct
  misc_feature 1..25: note = Oligonucleotide
  source 1..25: mol_type = other DNA
aggcagtgtccttcaaacccaagtc

SEQ ID NO: 37125 - DNA, 25 bp, synthetic construct
  misc_feature 1..25: note = Oligonucleotide
  source 1..25: mol_type = other DNA
gagaggcagtgtccttcaaacccaa

SEQ ID NO: 37126 - DNA, 25 bp, synthetic construct
  misc_feature 1..25: note = Oligonucleotide
  source 1..25: mol_type = other DNA
agagagaggcagtgtccttcaaacc

SEQ ID NO: 37127 - DNA, 25 bp, synthetic construct
  misc_feature 1..25: note = Oligonucleotide
  source 1..25: mol_type = other DNA
ggcagagagaggcagtgtccttcaa

SEQ ID NO: 37128 - DNA, 25 bp, synthetic construct
  misc_feature 1..25: note = Oligonucleotide
  source 1..25: mol_type = other DNA
atgggcagagagaggcagtgtcctt

SEQ ID NO: 37129 - DNA, 25 bp, synthetic construct
  misc_feature 1..25: note = Oligonucleotide
  source 1..25: mol_type = other DNA
gttatgggcagagagaggcagtgtc

SEQ ID NO: 37130 - DNA, 25 bp, synthetic construct
  misc_feature 1..25: note = Oligonucleotide
  source 1..25: mol_type = other DNA
ccagttatgggcagagagaggcagt

SEQ ID NO: 37131 - DNA, 25 bp, synthetic construct
  misc_feature 1..25: note = Oligonucleotide
  source 1..25: mol_type = other DNA
accccagttatgggcagagagaggc

SEQ ID NO: 37132 - DNA, 25 bp, synthetic construct
  misc_feature 1..25: note = Oligonucleotide
  source 1..25: mol_type = other DNA
gaaaccccagttatgggcagagaga

SEQ ID NO: 37133 - DNA, 25 bp, synthetic construct
  misc_feature 1..25: note = Oligonucleotide
  source 1..25: mol_type = other DNA
ctggaaaccccagttatgggcagag

SEQ ID NO: 37134 - DNA, 25 bp, synthetic construct
  misc_feature 1..25: note = Oligonucleotide
  source 1..25: mol_type = other DNA
aaactggaaaccccagttatgggca

SEQ ID NO: 37135 - DNA, 25 bp, synthetic construct
  misc_feature 1..25: note = Oligonucleotide
  source 1..25: mol_type = other DNA
gggaaactggaaaccccagttatgg

SEQ ID NO: 37136 - DNA, 25 bp, synthetic construct
  misc_feature 1..25: note = Oligonucleotide
  source 1..25: mol_type = other DNA
agagggaaactggaaaccccagtta

SEQ ID NO: 37137 - DNA, 25 bp, synthetic construct
  misc_feature 1..25: note = Oligonucleotide
  source 1..25: mol_type = other DNA
ctgagagggaaactggaaaccccag

SEQ ID NO: 37138 - DNA, 25 bp, synthetic construct
  misc_feature 1..25: note = Oligonucleotide
  source 1..25: mol_type = other DNA
ggactgagagggaaactggaaaccc

SEQ ID NO: 37139 - DNA, 25 bp, synthetic construct
  misc_feature 1..25: note = Oligonucleotide
  source 1..25: mol_type = other DNA
acaggactgagagggaaactggaaa

SEQ ID NO: 37140 - DNA, 25 bp, synthetic construct
  misc_feature 1..25: note = Oligonucleotide
  source 1..25: mol_type = other DNA
gagacaggactgagagggaaactgg

SEQ ID NO: 37141 - DNA, 25 bp, synthetic construct
  misc_feature 1..25: note = Oligonucleotide
  source 1..25: mol_type = other DNA
gaagagacaggactgagagggaaac

SEQ ID NO: 37142 - DNA, 25 bp, synthetic construct
  misc_feature 1..25: note = Oligonucleotide
  source 1..25: mol_type = other DNA
caggaagagacaggactgagaggga

SEQ ID NO: 37143 - DNA, 25 bp, synthetic construct
  misc_feature 1..25: note = Oligonucleotide
  source 1..25: mol_type = other DNA
ggccaggaagagacaggactgagag

SEQ ID NO: 37144 - DNA, 25 bp, synthetic construct
  misc_feature 1..25: note = Oligonucleotide
  source 1..25: mol_type = other DNA
tggggccaggaagagacaggactga

SEQ ID NO: 37145 - DNA, 25 bp, synthetic construct
  misc_feature 1..25: note = Oligonucleotide
  source 1..25: mol_type = other DNA
agctggggccaggaagagacaggac

SEQ ID NO: 37146 - DNA, 25 bp, synthetic construct
  misc_feature 1..25: note = Oligonucleotide
  source 1..25: mol_type = other DNA
tttagctggggccaggaagagacag

SEQ ID NO: 37147 - DNA, 25 bp, synthetic construct
  misc_feature 1..25: note = Oligonucleotide
  source 1..25: mol_type = other DNA
tcctttagctggggccaggaagaga

SEQ ID NO: 37148 - DNA, 25 bp, synthetic construct
  misc_feature 1..25: note = Oligonucleotide
  source 1..25: mol_type = other DNA
agatcctttagctggggccaggaag

SEQ ID NO: 37149 - DNA, 25 bp, synthetic construct
  misc_feature 1..25: note = Oligonucleotide
  source 1..25: mol_type = other DNA
atgagatcctttagctggggccagg

SEQ ID NO: 37150 - DNA, 25 bp, synthetic construct
  misc_feature 1..25: note = Oligonucleotide
  source 1..25: mol_type = other DNA
cgtatgagatcctttagctggggcc

SEQ ID NO: 37151 - DNA, 25 bp, synthetic construct
  misc_feature 1..25: note = Oligonucleotide
  source 1..25: mol_type = other DNA
caacgtatgagatcctttagctggg

SEQ ID NO: 37152 - DNA, 25 bp, synthetic construct
  misc_feature 1..25: note = Oligonucleotide
  source 1..25: mol_type = other DNA
catcaacgtatgagatcctttagct

SEQ ID NO: 37153 - DNA, 25 bp, synthetic construct
  misc_feature 1..25: note = Oligonucleotide
  source 1..25: mol_type = other DNA
gtccatcaacgtatgagatccttta

SEQ ID NO: 37154 - DNA, 25 bp, synthetic construct
  misc_feature 1..25: note = Oligonucleotide
  source 1..25: mol_type = other DNA
catgtccatcaacgtatgagatcct

SEQ ID NO: 37155 - DNA, 25 bp, synthetic construct
  misc_feature 1..25: note = Oligonucleotide
  source 1..25: mol_type = other DNA
ccacatgtccatcaacgtatgagat

SEQ ID NO: 37156 - DNA, 25 bp, synthetic construct
  misc_feature 1..25: note = Oligonucleotide
  source 1..25: mol_type = other DNA
tccccacatgtccatcaacgtatga

SEQ ID NO: 37157 - DNA, 25 bp, synthetic construct
  misc_feature 1..25: note = Oligonucleotide
  source 1..25: mol_type = other DNA
taatccccacatgtccatcaacgta

SEQ ID NO: 37158 - DNA, 25 bp, synthetic construct
  misc_feature 1..25: note = Oligonucleotide
  source 1..25: mol_type = other DNA
gcctaatccccacatgtccatcaac

SEQ ID NO: 37159 - DNA, 25 bp, synthetic construct
  misc_feature 1..25: note = Oligonucleotide
  source 1..25: mol_type = other DNA
aaggcctaatccccacatgtccatc

SEQ ID NO: 37160 - DNA, 25 bp, synthetic construct
  misc_feature 1..25: note = Oligonucleotide
  source 1..25: mol_type = other DNA
gggaaggcctaatccccacatgtcc

SEQ ID NO: 37161 - DNA, 25 bp, synthetic construct
  misc_feature 1..25: note = Oligonucleotide
  source 1..25: mol_type = other DNA
ttggggaaggcctaatccccacatg

SEQ ID NO: 37162 - DNA, 25 bp, synthetic construct
  misc_feature 1..25: note = Oligonucleotide
  source 1..25: mol_type = other DNA
gggttggggaaggcctaatccccac

SEQ ID NO: 37163 - DNA, 25 bp, synthetic construct
  misc_feature 1..25: note = Oligonucleotide
  source 1..25: mol_type = other DNA
tctgggttggggaaggcctaatccc

SEQ ID NO: 37164 - DNA, 25 bp, synthetic construct
  misc_feature 1..25: note = Oligonucleotide
  source 1..25: mol_type = other DNA
agctctgggttggggaaggcctaat

SEQ ID NO: 37165 - DNA, 25 bp, synthetic construct
  misc_feature 1..25: note = Oligonucleotide
  source 1..25: mol_type = other DNA
gaaagctctgggttggggaaggcct

SEQ ID NO: 37166 - DNA, 25 bp, synthetic construct
  misc_feature 1..25: note = Oligonucleotide
  source 1..25: mol_type = other DNA
ggggaaagctctgggttggggaagg

SEQ ID NO: 37167 - DNA, 25 bp, synthetic construct
  misc_feature 1..25: note = Oligonucleotide
  source 1..25: mol_type = other DNA
ccgggggaaagctctgggttgggga

SEQ ID NO: 37168 - DNA, 25 bp, synthetic construct
  misc_feature 1..25: note = Oligonucleotide
  source 1..25: mol_type = other DNA
ctgccgggggaaagctctgggttgg

SEQ ID NO: 37169 - DNA, 25 bp, synthetic construct
  misc_feature 1..25: note = Oligonucleotide
  source 1..25: mol_type = other DNA
cggctgccgggggaaagctctgggt

SEQ ID NO: 37170 - DNA, 25 bp, synthetic construct
  misc_feature 1..25: note = Oligonucleotide
  source 1..25: mol_type = other DNA
tgtcggctgccgggggaaagctctg

SEQ ID NO: 37171 - DNA, 25 bp, synthetic construct
  misc_feature 1..25: note = Oligonucleotide
  source 1..25: mol_type = other DNA
gagtgtcggctgccgggggaaagct

SEQ ID NO: 37172 - DNA, 25 bp, synthetic construct
  misc_feature 1..25: note = Oligonucleotide
  source 1..25: mol_type = other DNA
agggagtgtcggctgccgggggaaa

SEQ ID NO: 37173 - DNA, 25 bp, synthetic construct
  misc_feature 1..25: note = Oligonucleotide
  source 1..25: mol_type = other DNA
gacagggagtgtcggctgccggggg

SEQ ID NO: 37174 - DNA, 25 bp, synthetic construct
  misc_feature 1..25: note = Oligonucleotide
  source 1..25: mol_type = other DNA
ctggacagggagtgtcggctgccgg

SEQ ID NO: 37175 - DNA, 25 bp, synthetic construct
  misc_feature 1..25: note = Oligonucleotide
  source 1..25: mol_type = other DNA
ccactggacagggagtgtcggctgc

SEQ ID NO: 37176 - DNA, 25 bp, synthetic construct
  misc_feature 1..25: note = Oligonucleotide
  source 1..25: mol_type = other DNA
tgcccactggacagggagtgtcggc

SEQ ID NO: 37177 - DNA, 25 bp, synthetic construct
  misc_feature 1..25: note = Oligonucleotide
  source 1..25: mol_type = other DNA
cggtgcccactggacagggagtgtc

SEQ ID NO: 37178 - DNA, 25 bp, synthetic construct
  misc_feature 1..25: note = Oligonucleotide
  source 1..25: mol_type = other DNA
gggcggtgcccactggacagggagt

SEQ ID NO: 37179 - DNA, 25 bp, synthetic construct
  misc_feature 1..25: note = Oligonucleotide
  source 1..25: mol_type = other DNA
ggggggcggtgcccactggacaggg

SEQ ID NO: 37180 - DNA, 25 bp, synthetic construct
  misc_feature 1..25: note = Oligonucleotide
  source 1..25: mol_type = other DNA
gatggggggcggtgcccactggaca

SEQ ID NO: 37181 - DNA, 25 bp, synthetic construct
  misc_feature 1..25: note = Oligonucleotide
  source 1..25: mol_type = other DNA
ggcgatggggggcggtgcccactgg

SEQ ID NO: 37182 - DNA, 25 bp, synthetic construct
  misc_feature 1..25: note = Oligonucleotide
  source 1..25: mol_type = other DNA
tgaggcgatggggggcggtgcccac

SEQ ID NO: 37183 - DNA, 25 bp, synthetic construct
  misc_feature 1..25: note = Oligonucleotide
  source 1..25: mol_type = other DNA
ggatgaggcgatggggggcggtgcc

SEQ ID NO: 37184 - DNA, 25 bp, synthetic construct
  misc_feature 1..25: note = Oligonucleotide
  source 1..25: mol_type = other DNA
gagggatgaggcgatggggggcggt

SEQ ID NO: 37185 - DNA, 25 bp, synthetic construct
  misc_feature 1..25: note = Oligonucleotide
  source 1..25: mol_type = other DNA
tgggagggatgaggcgatggggggc

SEQ ID NO: 37186 - DNA, 25 bp, synthetic construct
  misc_feature 1..25: note = Oligonucleotide
  source 1..25: mol_type = other DNA
ccatgggagggatgaggcgatgggg

SEQ ID NO: 37187 - DNA, 25 bp, synthetic construct
  misc_feature 1..25: note = Oligonucleotide
  source 1..25: mol_type = other DNA
tgcccatgggagggatgaggcgatg

SEQ ID NO: 37188 - DNA, 25 bp, synthetic construct
  misc_feature 1..25: note = Oligonucleotide
  source 1..25: mol_type = other DNA
gactgcccatgggagggatgaggcg

SEQ ID NO: 37189 - DNA, 25 bp, synthetic construct
  misc_feature 1..25: note = Oligonucleotide
  source 1..25: mol_type = other DNA
tgagactgcccatgggagggatgag

SEQ ID NO: 37190 - DNA, 25 bp, synthetic construct
  misc_feature 1..25: note = Oligonucleotide
  source 1..25: mol_type = other DNA
ggatgagactgcccatgggagggat

SEQ ID NO: 37191 - DNA, 25 bp, synthetic construct
  misc_feature 1..25: note = Oligonucleotide
  source 1..25: mol_type = other DNA
cagggatgagactgcccatgggagg

SEQ ID NO: 37192 - DNA, 25 bp, synthetic construct
  misc_feature 1..25: note = Oligonucleotide
  source 1..25: mol_type = other DNA
ggacagggatgagactgcccatggg

SEQ ID NO: 37193 - DNA, 25 bp, synthetic construct
  misc_feature 1..25: note = Oligonucleotide
  source 1..25: mol_type = other DNA
tggggacagggatgagactgcccat

SEQ ID NO: 37194 - DNA, 25 bp, synthetic construct
  misc_feature 1..25: note = Oligonucleotide
  source 1..25: mol_type = other DNA
agctggggacagggatgagactgcc

SEQ ID NO: 37195 - DNA, 25 bp, synthetic construct
  misc_feature 1..25: note = Oligonucleotide
  source 1..25: mol_type = other DNA
ggcagctggggacagggatgagact

SEQ ID NO: 37196 - DNA, 25 bp, synthetic construct
  misc_feature 1..25: note = Oligonucleotide
  source 1..25: mol_type = other DNA
agtggcagctggggacagggatgag

SEQ ID NO: 37197 - DNA, 25 bp, synthetic construct
  misc_feature 1..25: note = Oligonucleotide
  source 1..25: mol_type = other DNA
gggagtggcagctggggacagggat

SEQ ID NO: 37198 - DNA, 25 bp, synthetic construct
  misc_feature 1..25: note = Oligonucleotide
  source 1..25: mol_type = other DNA
acagggagtggcagctggggacagg

SEQ ID NO: 37199 - DNA, 25 bp, synthetic construct
  misc_feature 1..25: note = Oligonucleotide
  source 1..25: mol_type = other DNA
tggacagggagtggcagctggggac

SEQ ID NO: 37200 - DNA, 25 bp, synthetic construct
  misc_feature 1..25: note = Oligonucleotide
  source 1..25: mol_type = other DNA
cagtggacagggagtggcagctggg

SEQ ID NO: 37201 - DNA, 25 bp, synthetic construct
  misc_feature 1..25: note = Oligonucleotide
  source 1..25: mol_type = other DNA
gcccagtggacagggagtggcagct

SEQ ID NO: 37202 - DNA, 25 bp, synthetic construct
  misc_feature 1..25: note = Oligonucleotide
  source 1..25: mol_type = other DNA
ggtgcccagtggacagggagtggca

SEQ ID NO: 37203 - DNA, 25 bp, synthetic construct
  misc_feature 1..25: note = Oligonucleotide
  source 1..25: mol_type = other DNA
gggggtgcccagtggacagggagtg

SEQ ID NO: 37204 - DNA, 25 bp, synthetic construct
  misc_feature 1..25: note = Oligonucleotide
  source 1..25: mol_type = other DNA
ggtgggggtgcccagtggacaggga

SEQ ID NO: 37205 - DNA, 25 bp, synthetic construct
  misc_feature 1..25: note = Oligonucleotide
  source 1..25: mol_type = other DNA
ggaggtgggggtgcccagtggacag

SEQ ID NO: 37206 - DNA, 25 bp, synthetic construct
  misc_feature 1..25: note = Oligonucleotide
  source 1..25: mol_type = other DNA
tggggaggtgggggtgcccagtgga

SEQ ID NO: 37207 - DNA, 25 bp, synthetic construct
  misc_feature 1..25: note = Oligonucleotide
  source 1..25: mol_type = other DNA
tgatggggaggtgggggtgcccagt

SEQ ID NO: 37208 - DNA, 25 bp, synthetic construct
  misc_feature 1..25: note = Oligonucleotide
  source 1..25: mol_type = other DNA
aggtgatggggaggtgggggtgccc

SEQ ID NO: 37209 - DNA, 25 bp, synthetic construct
  misc_feature 1..25: note = Oligonucleotide
  source 1..25: mol_type = other DNA
gagaggtgatggggaggtgggggtg

SEQ ID NO: 37210 - DNA, 25 bp, synthetic construct
  misc_feature 1..25: note = Oligonucleotide
  source 1..25: mol_type = other DNA
gatgagaggtgatggggaggtgggg

SEQ ID NO: 37211 - DNA, 25 bp, synthetic construct
  misc_feature 1..25: note = Oligonucleotide
  source 1..25: mol_type = other DNA
agggatgagaggtgatggggaggtg

SEQ ID NO: 37212 - DNA, 25 bp, synthetic construct
  misc_feature 1..25: note = Oligonucleotide
  source 1..25: mol_type = other DNA
gggagggatgagaggtgatggggag

SEQ ID NO: 37213 - DNA, 25 bp, synthetic construct
  misc_feature 1..25: note = Oligonucleotide
  source 1..25: mol_type = other DNA
catgggagggatgagaggtgatggg

SEQ ID NO: 37214 - DNA, 25 bp, synthetic construct
  misc_feature 1..25: note = Oligonucleotide
  source 1..25: mol_type = other DNA
gcccatgggagggatgagaggtgat

SEQ ID NO: 37215 - DNA, 25 bp, synthetic construct
  misc_feature 1..25: note = Oligonucleotide
  source 1..25: mol_type = other DNA
gctgcccatgggagggatgagaggt

SEQ ID NO: 37216 - DNA, 25 bp, synthetic construct
  misc_feature 1..25: note = Oligonucleotide
  source 1..25: mol_type = other DNA
gaggctgcccatgggagggatgaga

SEQ ID NO: 37217 - DNA, 25 bp, synthetic construct
  misc_feature 1..25: note = Oligonucleotide
  source 1..25: mol_type = other DNA
gatgaggctgcccatgggagggatg

SEQ ID NO: 37218 - DNA, 25 bp, synthetic construct
  misc_feature 1..25: note = Oligonucleotide
  source 1..25: mol_type = other DNA
agggatgaggctgcccatgggaggg

SEQ ID NO: 37219 - DNA, 25 bp, synthetic construct
  misc_feature 1..25: note = Oligonucleotide
  source 1..25: mol_type = other DNA
gacagggatgaggctgcccatggga

SEQ ID NO: 37220 - DNA, 25 bp, synthetic construct
  misc_feature 1..25: note = Oligonucleotide
  source 1..25: mol_type = other DNA
ggggacagggatgaggctgcccatg

SEQ ID NO: 37221 - DNA, 25 bp, synthetic construct
  misc_feature 1..25: note = Oligonucleotide
  source 1..25: mol_type = other DNA
gctggggacagggatgaggctgccc

SEQ ID NO: 37222 - DNA, 25 bp, synthetic construct
  misc_feature 1..25: note = Oligonucleotide
  source 1..25: mol_type = other DNA
gcagctggggacagggatgaggctg

SEQ ID NO: 37223 - DNA, 25 bp, synthetic construct
  misc_feature 1..25: note = Oligonucleotide
  source 1..25: mol_type = other DNA
gtggcagctggggacagggatgagg

SEQ ID NO: 37224 - DNA, 25 bp, synthetic construct
  misc_feature 1..25: note = Oligonucleotide
  source 1..25: mol_type = other DNA
ggagtggcagctggggacagggatg

SEQ ID NO: 37225 - DNA, 25 bp, synthetic construct
  misc_feature 1..25: note = Oligonucleotide
  source 1..25: mol_type = other DNA
cagggagtggcagctggggacaggg

SEQ ID NO: 37226 - DNA, 25 bp, synthetic construct
  misc_feature 1..25: note = Oligonucleotide
  source 1..25: mol_type = other DNA
ggacagggagtggcagctggggaca

SEQ ID NO: 37227 - DNA, 25 bp, synthetic construct
  misc_feature 1..25: note = Oligonucleotide
  source 1..25: mol_type = other DNA
agtggacagggagtggcagctgggg

SEQ ID NO: 37228 - DNA, 25 bp, synthetic construct
  misc_feature 1..25: note = Oligonucleotide
  source 1..25: mol_type = other DNA
cccagtggacagggagtggcagctg

SEQ ID NO: 37229 - DNA, 25 bp, synthetic construct
  misc_feature 1..25: note = Oligonucleotide
  source 1..25: mol_type = other DNA
gtgcccagtggacagggagtggcag

SEQ ID NO: 37230 - DNA, 25 bp, synthetic construct
  misc_feature 1..25: note = Oligonucleotide
  source 1..25: mol_type = other DNA
ggggtgcccagtggacagggagtgg

SEQ ID NO: 37231 - DNA, 25 bp, synthetic construct
  misc_feature 1..25: note = Oligonucleotide
  source 1..25: mol_type = other DNA
gtgggggtgcccagtggacagggag

SEQ ID NO: 37232 - DNA, 25 bp, synthetic construct
  misc_feature 1..25: note = Oligonucleotide
  source 1..25: mol_type = other DNA
gaggtgggggtgcccagtggacagg

SEQ ID NO: 37233 - DNA, 25 bp, synthetic construct
  misc_feature 1..25: note = Oligonucleotide
  source 1..25: mol_type = other DNA
ggggaggtgggggtgcccagtggac

SEQ ID NO: 37234 - DNA, 25 bp, synthetic construct
  misc_feature 1..25: note = Oligonucleotide
  source 1..25: mol_type = other DNA
gatggggaggtgggggtgcccagtg

SEQ ID NO: 37235 - DNA, 25 bp, synthetic construct
  misc_feature 1..25: note = Oligonucleotide
  source 1..25: mol_type = other DNA
ggtgatggggaggtgggggtgccca

SEQ ID NO: 37236 - DNA, 25 bp, synthetic construct
  misc_feature 1..25: note = Oligonucleotide
  source 1..25: mol_type = other DNA
agaggtgatggggaggtgggggtgc

SEQ ID NO: 37237 - DNA, 25 bp, synthetic construct
  misc_feature 1..25: note = Oligonucleotide
  source 1..25: mol_type = other DNA
atgagaggtgatggggaggtggggg

SEQ ID NO: 37238 - DNA, 25 bp, synthetic construct
  misc_feature 1..25: note = Oligonucleotide
  source 1..25: mol_type = other DNA
aggatgagaggtgatggggaggtgg

SEQ ID NO: 37239 - DNA, 25 bp, synthetic construct
  misc_feature 1..25: note = Oligonucleotide
  source 1..25: mol_type = other DNA
ggaaggatgagaggtgatggggagg

SEQ ID NO: 37240 - DNA, 25 bp, synthetic construct
  misc_feature 1..25: note = Oligonucleotide
  source 1..25: mol_type = other DNA
atgggaaggatgagaggtgatgggg

SEQ ID NO: 37241 - DNA, 25 bp, synthetic construct
  misc_feature 1..25: note = Oligonucleotide
  source 1..25: mol_type = other DNA
cccatgggaaggatgagaggtgatg

SEQ ID NO: 37242 - DNA, 25 bp, synthetic construct
  misc_feature 1..25: note = Oligonucleotide
  source 1..25: mol_type = other DNA
ctgcccatgggaaggatgagaggtg

SEQ ID NO: 37243 - DNA, 25 bp, synthetic construct
  misc_feature 1..25: note = Oligonucleotide
  source 1..25: mol_type = other DNA
aggctgcccatgggaaggatgagag

SEQ ID NO: 37244 - DNA, 25 bp, synthetic construct
  misc_feature 1..25: note = Oligonucleotide
  source 1..25: mol_type = other DNA
atgaggctgcccatgggaaggatga

SEQ ID NO: 37245 - DNA, 25 bp, synthetic construct
  misc_feature 1..25: note = Oligonucleotide
  source 1..25: mol_type = other DNA
gggatgaggctgcccatgggaagga

SEQ ID NO: 37246 - DNA, 25 bp, synthetic construct
  misc_feature 1..25: note = Oligonucleotide
  source 1..25: mol_type = other DNA
acagggatgaggctgcccatgggaa

SEQ ID NO: 37247 - DNA, 25 bp, synthetic construct
  misc_feature 1..25: note = Oligonucleotide
  source 1..25: mol_type = other DNA
gggacagggatgaggctgcccatgg

SEQ ID NO: 37248 - DNA, 25 bp, synthetic construct
  misc_feature 1..25: note = Oligonucleotide
  source 1..25: mol_type = other DNA
ctggggacagggatgaggctgccca

SEQ ID NO: 37249 - DNA, 25 bp, synthetic construct
  misc_feature 1..25: note = Oligonucleotide
  source 1..25: mol_type = other DNA
gagctggggacagggatgaggctgc

SEQ ID NO: 37250 - DNA, 25 bp, synthetic construct
  misc_feature 1..25: note = Oligonucleotide
  source 1..25: mol_type = other DNA
gctgagctggggacagggatgaggc

SEQ ID NO: 37251 - DNA, 25 bp, synthetic construct
  misc_feature 1..25: note = Oligonucleotide
  source 1..25: mol_type = other DNA
gcagctgagctggggacagggatga

SEQ ID NO: 37252 - DNA, 25 bp, synthetic construct
  misc_feature 1..25: note = Oligonucleotide
  source 1..25: mol_type = other DNA
gaggcagctgagctggggacaggga

SEQ ID NO: 37253 - DNA, 25 bp, synthetic construct
  misc_feature 1..25: note = Oligonucleotide
  source 1..25: mol_type = other DNA
atggaggcagctgagctggggacag

SEQ ID NO: 37254 - DNA, 25 bp, synthetic construct
  misc_feature 1..25: note = Oligonucleotide
  source 1..25: mol_type = other DNA
gcgatggaggcagctgagctgggga

SEQ ID NO: 37255 - DNA, 25 bp, synthetic construct
  misc_feature 1..25: note = Oligonucleotide
  source 1..25: mol_type = other DNA
accgcgatggaggcagctgagctgg

SEQ ID NO: 37256 - DNA, 25 bp, synthetic construct
  misc_feature 1..25: note = Oligonucleotide
  source 1..25: mol_type = other DNA
gcaaccgcgatggaggcagctgagc

SEQ ID NO: 37257 - DNA, 25 bp, synthetic construct
  misc_feature 1..25: note = Oligonucleotide
  source 1..25: mol_type = other DNA
ggagcaaccgcgatggaggcagctg

SEQ ID NO: 37258 - DNA, 25 bp, synthetic construct
  misc_feature 1..25: note = Oligonucleotide
  source 1..25: mol_type = other DNA
aagggagcaaccgcgatggaggcag

SEQ ID NO: 37259 - DNA, 25 bp, synthetic construct
  misc_feature 1..25: note = Oligonucleotide
  source 1..25: mol_type = other DNA
tgcaagggagcaaccgcgatggagg

SEQ ID NO: 37260 - DNA, 25 bp, synthetic construct
  misc_feature 1..25: note = Oligonucleotide
  source 1..25: mol_type = other DNA
ggctgcaagggagcaaccgcgatgg

SEQ ID NO: 37261 - DNA, 25 bp, synthetic construct
  misc_feature 1..25: note = Oligonucleotide
  source 1..25: mol_type = other DNA
ttgggctgcaagggagcaaccgcga

SEQ ID NO: 37262 - DNA, 25 bp, synthetic construct
  misc_feature 1..25: note = Oligonucleotide
  source 1..25: mol_type = other DNA
cacttgggctgcaagggagcaaccg

SEQ ID NO: 37263 - DNA, 25 bp, synthetic construct
  misc_feature 1..25: note = Oligonucleotide
  source 1..25: mol_type = other DNA
atgcacttgggctgcaagggagcaa

SEQ ID NO: 37264 - DNA, 25 bp, synthetic construct
  misc_feature 1..25: note = Oligonucleotide
  source 1..25: mol_type = other DNA
cacatgcacttgggctgcaagggag

SEQ ID NO: 37265 - DNA, 25 bp, synthetic construct
  misc_feature 1..25: note = Oligonucleotide
  source 1..25: mol_type = other DNA
cttcacatgcacttgggctgcaagg

SEQ ID NO: 37266 - DNA, 25 bp, synthetic construct
  misc_feature 1..25: note = Oligonucleotide
  source 1..25: mol_type = other DNA
aaacttcacatgcacttgggctgca

SEQ ID NO: 37267 - DNA, 25 bp, synthetic construct
  misc_feature 1..25: note = Oligonucleotide
  source 1..25: mol_type = other DNA
cagaaacttcacatgcacttgggct

SEQ ID NO: 37268 - DNA, 25 bp, synthetic construct
  misc_feature 1..25: note = Oligonucleotide
  source 1..25: mol_type = other DNA
ggtcagaaacttcacatgcacttgg

SEQ ID NO: 37269 - DNA, 25 bp, synthetic construct
  misc_feature 1..25: note = Oligonucleotide
  source 1..25: mol_type = other DNA
gagggtcagaaacttcacatgcact

SEQ ID NO: 37270 - DNA, 25 bp, synthetic construct
  misc_feature 1..25: note = Oligonucleotide
  source 1..25: mol_type = other DNA
tttgagggtcagaaacttcacatgc

SEQ ID NO: 37271 - DNA, 25 bp, synthetic construct
  misc_feature 1..25: note = Oligonucleotide
  source 1..25: mol_type = other DNA
gggtttgagggtcagaaacttcaca

SEQ ID NO: 37272 - DNA, 25 bp, synthetic construct
  misc_feature 1..25: note = Oligonucleotide
  source 1..25: mol_type = other DNA
agggggtttgagggtcagaaacttc

SEQ ID NO: 37273 - DNA, 25 bp, synthetic construct
  misc_feature 1..25: note = Oligonucleotide
  source 1..25: mol_type = other DNA
ttcagggggtttgagggtcagaaac

SEQ ID NO: 37274 - DNA, 25 bp, synthetic construct
  misc_feature 1..25: note = Oligonucleotide
  source 1..25: mol_type = other DNA
aagttcagggggtttgagggtcaga

SEQ ID NO: 37275 - DNA, 25 bp, synthetic construct
  misc_feature 1..25: note = Oligonucleotide
  source 1..25: mol_type = other DNA
ggcaagttcagggggtttgagggtc

SEQ ID NO: 37276 - DNA, 25 bp, synthetic construct
  misc_feature 1..25: note = Oligonucleotide
  source 1..25: mol_type = other DNA
agaggcaagttcagggggtttgagg

SEQ ID NO: 37277 - DNA, 25 bp, synthetic construct
  misc_feature 1..25: note = Oligonucleotide
  source 1..25: mol_type = other DNA
gggagaggcaagttcagggggtttg

SEQ ID NO: 37278 - DNA, 25 bp, synthetic construct
  misc_feature 1..25: note = Oligonucleotide
  source 1..25: mol_type = other DNA
taggggagaggcaagttcagggggt

SEQ ID NO: 37279 - DNA, 25 bp, synthetic construct
  misc_feature 1..25: note = Oligonucleotide
  source 1..25: mol_type = other DNA
aagtaggggagaggcaagttcaggg

SEQ ID NO: 37280 - DNA, 25 bp, synthetic construct
  misc_feature 1..25: note = Oligonucleotide
  source 1..25: mol_type = other DNA
gagaagtaggggagaggcaagttca

SEQ ID NO: 37281 - DNA, 25 bp, synthetic construct
  misc_feature 1..25: note = Oligonucleotide
  source 1..25: mol_type = other DNA
atggagaagtaggggagaggcaagt

SEQ ID NO: 37282 - DNA, 25 bp, synthetic construct
  misc_feature 1..25: note = Oligonucleotide
  source 1..25: mol_type = other DNA
tacatggagaagtaggggagaggca

SEQ ID NO: 37283 - DNA, 25 bp, synthetic construct
  misc_feature 1..25: note = Oligonucleotide
  source 1..25: mol_type = other DNA
caatacatggagaagtaggggagag

SEQ ID NO: 37284 - DNA, 25 bp, synthetic construct
  misc_feature 1..25: note = Oligonucleotide
  source 1..25: mol_type = other DNA
cagcaatacatggagaagtagggga

SEQ ID NO: 37285 - DNA, 25 bp, synthetic construct
  misc_feature 1..25: note = Oligonucleotide
  source 1..25: mol_type = other DNA
agacagcaatacatggagaagtagg

SEQ ID NO: 37286 - DNA, 25 bp, synthetic construct
  misc_feature 1..25: note = Oligonucleotide
  source 1..25: mol_type = other DNA
gggagacagcaatacatggagaagt

SEQ ID NO: 37287 - DNA, 25 bp, synthetic construct
  misc_feature 1..25: note = Oligonucleotide
  source 1..25: mol_type = other DNA
ggggggagacagcaatacatggaga

SEQ ID NO: 37288 - DNA, 25 bp, synthetic construct
  misc_feature 1..25: note = Oligonucleotide
  source 1..25: mol_type = other DNA
gaaggggggagacagcaatacatgg

SEQ ID NO: 37289 - DNA, 25 bp, synthetic construct
  misc_feature 1..25: note = Oligonucleotide
  source 1..25: mol_type = other DNA
tgtgaaggggggagacagcaataca

SEQ ID NO: 37290 - DNA, 25 bp, synthetic construct
  misc_feature 1..25: note = Oligonucleotide
  source 1..25: mol_type = other DNA
ggctgtgaaggggggagacagcaat

SEQ ID NO: 37291 - DNA, 25 bp, synthetic construct
  misc_feature 1..25: note = Oligonucleotide
  source 1..25: mol_type = other DNA
actggctgtgaaggggggagacagc

SEQ ID NO: 37292 - DNA, 25 bp, synthetic construct
  misc_feature 1..25: note = Oligonucleotide
  source 1..25: mol_type = other DNA
aaaactggctgtgaaggggggagac

SEQ ID NO: 37293 - DNA, 25 bp, synthetic construct
  misc_feature 1..25: note = Oligonucleotide
  source 1..25: mol_type = other DNA
gggaaaactggctgtgaagggggga

SEQ ID NO: 37294 - DNA, 25 bp, synthetic construct
  misc_feature 1..25: note = Oligonucleotide
  source 1..25: mol_type = other DNA
ttggggaaaactggctgtgaagggg

SEQ ID NO: 37295 - DNA, 25 bp, synthetic construct
  misc_feature 1..25: note = Oligonucleotide
  source 1..25: mol_type = other DNA
tttttggggaaaactggctgtgaag

SEQ ID NO: 37296 - DNA, 25 bp, synthetic construct
  misc_feature 1..25: note = Oligonucleotide
  source 1..25: mol_type = other DNA
gactttttggggaaaactggctgtg

SEQ ID NO: 37297 - DNA, 25 bp, synthetic construct
  misc_feature 1..25: note = Oligonucleotide
  source 1..25: mol_type = other DNA
ggtgactttttggggaaaactggct

SEQ ID NO: 37298 - DNA, 25 bp, synthetic construct
  misc_feature 1..25: note = Oligonucleotide
  source 1..25: mol_type = other DNA
agaggtgactttttggggaaaactg

SEQ ID NO: 37299 - DNA, 25 bp, synthetic construct
  misc_feature 1..25: note = Oligonucleotide
  source 1..25: mol_type = other DNA
agtagaggtgactttttggggaaaa

SEQ ID NO: 37300 - DNA, 25 bp, synthetic construct
  misc_feature 1..25: note = Oligonucleotide
  source 1..25: mol_type = other DNA
gacagtagaggtgactttttgggga

SEQ ID NO: 37301 - DNA, 25 bp, synthetic construct
  misc_feature 1..25: note = Oligonucleotide
  source 1..25: mol_type = other DNA
atggacagtagaggtgactttttgg

SEQ ID NO: 37302 - DNA, 25 bp, synthetic construct
  misc_feature 1..25: note = Oligonucleotide
  source 1..25: mol_type = other DNA
aagatggacagtagaggtgactttt

SEQ ID NO: 37303 - DNA, 25 bp, synthetic construct
  misc_feature 1..25: note = Oligonucleotide
  source 1..25: mol_type = other DNA
gacaagatggacagtagaggtgact

SEQ ID NO: 37304 - DNA, 25 bp, synthetic construct
  misc_feature 1..25: note = Oligonucleotide
  source 1..25: mol_type = other DNA
ggagacaagatggacagtagaggtg

SEQ ID NO: 37305 - DNA, 25 bp, synthetic construct
  misc_feature 1..25: note = Oligonucleotide
  source 1..25: mol_type = other DNA
acgggagacaagatggacagtagag

SEQ ID NO: 37306 - DNA, 25 bp, synthetic construct
  misc_feature 1..25: note = Oligonucleotide
  source 1..25: mol_type = other DNA
gggacgggagacaagatggacagta

SEQ ID NO: 37307 - DNA, 25 bp, synthetic construct
  misc_feature 1..25: note = Oligonucleotide
  source 1..25: mol_type = other DNA
tgggggacgggagacaagatggaca

SEQ ID NO: 37308 - DNA, 25 bp, synthetic construct
  misc_feature 1..25: note = Oligonucleotide
  source 1..25: mol_type = other DNA
cggtgggggacgggagacaagatgg

SEQ ID NO: 37309 - DNA, 25 bp, synthetic construct
  misc_feature 1..25: note = Oligonucleotide
  source 1..25: mol_type = other DNA
agccggtgggggacgggagacaaga

SEQ ID NO: 37310 - DNA, 25 bp, synthetic construct
  misc_feature 1..25: note = Oligonucleotide
  source 1..25: mol_type = other DNA
aggagccggtgggggacgggagaca

SEQ ID NO: 37311 - DNA, 25 bp, synthetic construct
  misc_feature 1..25: note = Oligonucleotide
  source 1..25: mol_type = other DNA
ctgaggagccggtgggggacgggag

SEQ ID NO: 37312 - DNA, 25 bp, synthetic construct
  misc_feature 1..25: note = Oligonucleotide
  source 1..25: mol_type = other DNA
aggctgaggagccggtgggggacgg

SEQ ID NO: 37313 - DNA, 25 bp, synthetic construct
  misc_feature 1..25: note = Oligonucleotide
  source 1..25: mol_type = other DNA
cgcaggctgaggagccggtggggga

SEQ ID NO: 37314 - DNA, 25 bp, synthetic construct
  misc_feature 1..25: note = Oligonucleotide
  source 1..25: mol_type = other DNA
tgccgcaggctgaggagccggtggg

SEQ ID NO: 37315 - DNA, 25 bp, synthetic construct
  misc_feature 1..25: note = Oligonucleotide
  source 1..25: mol_type = other DNA
gtctgccgcaggctgaggagccggt

SEQ ID NO: 37316 - DNA, 25 bp, synthetic construct
  misc_feature 1..25: note = Oligonucleotide
  source 1..25: mol_type = other DNA
gaagtctgccgcaggctgaggagcc

SEQ ID NO: 37317 - DNA, 25 bp, synthetic construct
  misc_feature 1..25: note = Oligonucleotide
  source 1..25: mol_type = other DNA
gaggaagtctgccgcaggctgagga

SEQ ID NO: 37318 - DNA, 25 bp, synthetic construct
  misc_feature 1..25: note = Oligonucleotide
  source 1..25: mol_type = other DNA
agagaggaagtctgccgcaggctga

SEQ ID NO: 37319 - DNA, 25 bp, synthetic construct
  misc_feature 1..25: note = Oligonucleotide
  source 1..25: mol_type = other DNA
tggagagaggaagtctgccgcaggc

SEQ ID NO: 37320 - DNA, 25 bp, synthetic construct
  misc_feature 1..25: note = Oligonucleotide
  source 1..25: mol_type = other DNA
gtatggagagaggaagtctgccgca

SEQ ID NO: 37321 - DNA, 25 bp, synthetic construct
  misc_feature 1..25: note = Oligonucleotide
  source 1..25: mol_type = other DNA
tgggtatggagagaggaagtctgcc

SEQ ID NO: 37322 - DNA, 25 bp, synthetic construct
  misc_feature 1..25: note = Oligonucleotide
  source 1..25: mol_type = other DNA
atttgggtatggagagaggaagtct

SEQ ID NO: 37323 - DNA, 25 bp, synthetic construct
  misc_feature 1..25: note = Oligonucleotide
  source 1..25: mol_type = other DNA
tcaatttgggtatggagagaggaag

SEQ ID NO: 37324 - DNA, 25 bp, synthetic construct
  misc_feature 1..25: note = Oligonucleotide
  source 1..25: mol_type = other DNA
gtttcaatttgggtatggagagagg

SEQ ID NO: 37325 - DNA, 25 bp, synthetic construct
  misc_feature 1..25: note = Oligonucleotide
  source 1..25: mol_type = other DNA
gcagtttcaatttgggtatggagag

SEQ ID NO: 37326 - DNA, 25 bp, synthetic construct
  misc_feature 1..25: note = Oligonucleotide
  source 1..25: mol_type = other DNA
ggagcagtttcaatttgggtatgga

SEQ ID NO: 37327 - DNA, 25 bp, synthetic construct
  misc_feature 1..25: note = Oligonucleotide
  source 1..25: mol_type = other DNA
gtgggagcagtttcaatttgggtat

SEQ ID NO: 37328 - DNA, 25 bp, synthetic construct
  misc_feature 1..25: note = Oligonucleotide
  source 1..25: mol_type = other DNA
ctggtgggagcagtttcaatttggg

SEQ ID NO: 37329 - DNA, 25 bp, synthetic construct
  misc_feature 1..25: note = Oligonucleotide
  source 1..25: mol_type = other DNA
accctggtgggagcagtttcaattt

SEQ ID NO: 37330 - DNA, 25 bp, synthetic construct
  misc_feature 1..25: note = Oligonucleotide
  source 1..25: mol_type = other DNA
gtgaccctggtgggagcagtttcaa

SEQ ID NO: 37331 - DNA, 25 bp, synthetic construct
  misc_feature 1..25: note = Oligonucleotide
  source 1..25: mol_type = other DNA
ccggtgaccctggtgggagcagttt

SEQ ID NO: 37332 - DNA, 25 bp, synthetic construct
  misc_feature 1..25: note = Oligonucleotide
  source 1..25: mol_type = other DNA
ccgccggtgaccctggtgggagcag

SEQ ID NO: 37333 - DNA, 25 bp, synthetic construct
  misc_feature 1..25: note = Oligonucleotide
  source 1..25: mol_type = other DNA
aggccgccggtgaccctggtgggag

SEQ ID NO: 37334 - DNA, 25 bp, synthetic construct
  misc_feature 1..25: note = Oligonucleotide
  source 1..25: mol_type = other DNA
tggaggccgccggtgaccctggtgg

SEQ ID NO: 37335 - DNA, 25 bp, synthetic construct
  misc_feature 1..25: note = Oligonucleotide
  source 1..25: mol_type = other DNA
ccctggaggccgccggtgaccctgg

SEQ ID NO: 37336 - DNA, 25 bp, synthetic construct
  misc_feature 1..25: note = Oligonucleotide
  source 1..25: mol_type = other DNA
aggccctggaggccgccggtgaccc

SEQ ID NO: 37337 - DNA, 25 bp, synthetic construct
  misc_feature 1..25: note = Oligonucleotide
  source 1..25: mol_type = other DNA
ggaaggccctggaggccgccggtga

SEQ ID NO: 37338 - DNA, 25 bp, synthetic construct
  misc_feature 1..25: note = Oligonucleotide
  source 1..25: mol_type = other DNA
ggaggaaggccctggaggccgccgg

SEQ ID NO: 37339 - DNA, 25 bp, synthetic construct
  misc_feature 1..25: note = Oligonucleotide
  source 1..25: mol_type = other DNA
tggggaggaaggccctggaggccgc

SEQ ID NO: 37340 - DNA, 25 bp, synthetic construct
  misc_feature 1..25: note = Oligonucleotide
  source 1..25: mol_type = other DNA
ccatggggaggaaggccctggaggc

SEQ ID NO: 37341 - DNA, 25 bp, synthetic construct
  misc_feature 1..25: note = Oligonucleotide
  source 1..25: mol_type = other DNA
catccatggggaggaaggccctgga

SEQ ID NO: 37342 - DNA, 25 bp, synthetic construct
  misc_feature 1..25: note = Oligonucleotide
  source 1..25: mol_type = other DNA
atgcatccatggggaggaaggccct

SEQ ID NO: 37343 - DNA, 25 bp, synthetic construct
  misc_feature 1..25: note = Oligonucleotide
  source 1..25: mol_type = other DNA
gccatgcatccatggggaggaaggc

SEQ ID NO: 37344 - DNA, 25 bp, synthetic construct
  misc_feature 1..25: note = Oligonucleotide
  source 1..25: mol_type = other DNA
ctggccatgcatccatggggaggaa

SEQ ID NO: 37345 - DNA, 25 bp, synthetic construct
  misc_feature 1..25: note = Oligonucleotide
  source 1..25: mol_type = other DNA
gtgctggccatgcatccatggggag

SEQ ID NO: 37346 - DNA, 25 bp, synthetic construct
  misc_feature 1..25: note = Oligonucleotide
  source 1..25: mol_type = other DNA
ggagtgctggccatgcatccatggg

SEQ ID NO: 37347 - DNA, 25 bp, synthetic construct
  misc_feature 1..25: note = Oligonucleotide
  source 1..25: mol_type = other DNA
gcaggagtgctggccatgcatccat

SEQ ID NO: 37348 - DNA, 25 bp, synthetic construct
  misc_feature 1..25: note = Oligonucleotide
  source 1..25: mol_type = other DNA
tcagcaggagtgctggccatgcatc

SEQ ID NO: 37349 - DNA, 25 bp, synthetic construct
  misc_feature 1..25: note = Oligonucleotide
  source 1..25: mol_type = other DNA
aggtcagcaggagtgctggccatgc

SEQ ID NO: 37350 - DNA, 25 bp, synthetic construct
  misc_feature 1..25: note = Oligonucleotide
  source 1..25: mol_type = other DNA
ctgaggtcagcaggagtgctggcca

SEQ ID NO: 37351 - DNA, 25 bp, synthetic construct
  misc_feature 1..25: note = Oligonucleotide
  source 1..25: mol_type = other DNA
cagctgaggtcagcaggagtgctgg

SEQ ID NO: 37352 - DNA, 25 bp, synthetic construct
  misc_feature 1..25: note = Oligonucleotide
  source 1..25: mol_type = other DNA
tgccagctgaggtcagcaggagtgc

SEQ ID NO: 37353 - DNA, 25 bp, synthetic construct
  misc_feature 1..25: note = Oligonucleotide
  source 1..25: mol_type = other DNA
aaatgccagctgaggtcagcaggag

SEQ ID NO: 37354 - DNA, 25 bp, synthetic construct
  misc_feature 1..25: note = Oligonucleotide
  source 1..25: mol_type = other DNA
accaaatgccagctgaggtcagcag

SEQ ID NO: 37355 - DNA, 25 bp, synthetic construct
  misc_feature 1..25: note = Oligonucleotide
  source 1..25: mol_type = other DNA
gaaaccaaatgccagctgaggtcag

SEQ ID NO: 37356 - DNA, 25 bp, synthetic construct
  misc_feature 1..25: note = Oligonucleotide
  source 1..25: mol_type = other DNA
aaagaaaccaaatgccagctgaggt

SEQ ID NO: 37357 - DNA, 25 bp, synthetic construct
  misc_feature 1..25: note = Oligonucleotide
  source 1..25: mol_type = other DNA
agcaaagaaaccaaatgccagctga

SEQ ID NO: 37358 - DNA, 25 bp, synthetic construct
  misc_feature 1..25: note = Oligonucleotide
  source 1..25: mol_type = other DNA
aggagcaaagaaaccaaatgccagc

SEQ ID NO: 37359 - DNA, 25 bp, synthetic construct
  misc_feature 1..25: note = Oligonucleotide
  source 1..25: mol_type = other DNA
agaaggagcaaagaaaccaaatgcc

SEQ ID NO: 37360 - DNA, 25 bp, synthetic construct
  misc_feature 1..25: note = Oligonucleotide
  source 1..25: mol_type = other DNA
ggaagaaggagcaaagaaaccaaat

SEQ ID NO: 37361 - DNA, 25 bp, synthetic construct
  misc_feature 1..25: note = Oligonucleotide
  source 1..25: mol_type = other DNA
cacggaagaaggagcaaagaaacca

SEQ ID NO: 37362 - DNA, 25 bp, synthetic construct
  misc_feature 1..25: note = Oligonucleotide
  source 1..25: mol_type = other DNA
tttcacggaagaaggagcaaagaaa

SEQ ID NO: 37363 - DNA, 25 bp, synthetic construct
  misc_feature 1..25: note = Oligonucleotide
  source 1..25: mol_type = other DNA
gcgtttcacggaagaaggagcaaag

SEQ ID NO: 37364 - DNA, 25 bp, synthetic construct
  misc_feature 1..25: note = Oligonucleotide
  source 1..25: mol_type = other DNA
ggagcgtttcacggaagaaggagca

SEQ ID NO: 37365 - DNA, 25 bp, synthetic construct
  misc_feature 1..25: note = Oligonucleotide
  source 1..25: mol_type = other DNA
ggaggagcgtttcacggaagaagga

SEQ ID NO: 37366 - DNA, 25 bp, synthetic construct
  misc_feature 1..25: note = Oligonucleotide
  source 1..25: mol_type = other DNA
tggggaggagcgtttcacggaagaa

SEQ ID NO: 37367 - DNA, 25 bp, synthetic construct
  misc_feature 1..25: note = Oligonucleotide
  source 1..25: mol_type = other DNA
ctttggggaggagcgtttcacggaa

SEQ ID NO: 37368 - DNA, 25 bp, synthetic construct
  misc_feature 1..25: note = Oligonucleotide
  source 1..25: mol_type = other DNA
aagctttggggaggagcgtttcacg

SEQ ID NO: 37369 - DNA, 25 bp, synthetic construct
  misc_feature 1..25: note = Oligonucleotide
  source 1..25: mol_type = other DNA
ctaaagctttggggaggagcgtttc

SEQ ID NO: 37370 - DNA, 25 bp, synthetic construct
  misc_feature 1..25: note = Oligonucleotide
  source 1..25: mol_type = other DNA
gtcctaaagctttggggaggagcgt

SEQ ID NO: 37371 - DNA, 25 bp, synthetic construct
  misc_feature 1..25: note = Oligonucleotide
  source 1..25: mol_type = other DNA
gttgtcctaaagctttggggaggag

SEQ ID NO: 37372 - DNA, 25 bp, synthetic construct
  misc_feature 1..25: note = Oligonucleotide
  source 1..25: mol_type = other DNA
agtgttgtcctaaagctttggggag

SEQ ID NO: 37373 - DNA, 25 bp, synthetic construct
  misc_feature 1..25: note = Oligonucleotide
  source 1..25: mol_type = other DNA
gtaagtgttgtcctaaagctttggg

SEQ ID NO: 37374 - DNA, 25 bp, synthetic construct
  misc_feature 1..25: note = Oligonucleotide
  source 1..25: mol_type = other DNA
ccagtaagtgttgtcctaaagcttt

SEQ ID NO: 37375 - DNA, 25 bp, synthetic construct
  misc_feature 1..25: note = Oligonucleotide
  source 1..25: mol_type = other DNA
aaaccagtaagtgttgtcctaaagc

SEQ ID NO: 37376 - DNA, 25 bp, synthetic construct
  misc_feature 1..25: note = Oligonucleotide
  source 1..25: mol_type = other DNA
ggaaaaccagtaagtgttgtcctaa

SEQ ID NO: 37377 - DNA, 25 bp, synthetic construct
  misc_feature 1..25: note = Oligonucleotide
  source 1..25: mol_type = other DNA
aggggaaaaccagtaagtgttgtcc

SEQ ID NO: 37378 - DNA, 25 bp, synthetic construct
  misc_feature 1..25: note = Oligonucleotide
  source 1..25: mol_type = other DNA
aggaggggaaaaccagtaagtgttg

SEQ ID NO: 37379 - DNA, 25 bp, synthetic construct
  misc_feature 1..25: note = Oligonucleotide
  source 1..25: mol_type = other DNA
gaaaggaggggaaaaccagtaagtg

SEQ ID NO: 37380 - DNA, 25 bp, synthetic construct
  misc_feature 1..25: note = Oligonucleotide
  source 1..25: mol_type = other DNA
tgagaaaggaggggaaaaccagtaa

SEQ ID NO: 37381 - DNA, 25 bp, synthetic construct
  misc_feature 1..25: note = Oligonucleotide
  source 1..25: mol_type = other DNA
atctgagaaaggaggggaaaaccag

SEQ ID NO: 37382 - DNA, 25 bp, synthetic construct
  misc_feature 1..25: note = Oligonucleotide
  source 1..25: mol_type = other DNA
gccatctgagaaaggaggggaaaac

SEQ ID NO: 37383 - DNA, 25 bp, synthetic construct
  misc_feature 1..25: note = Oligonucleotide
  source 1..25: mol_type = other DNA
ggtgccatctgagaaaggaggggaa

SEQ ID NO: 37384 - DNA, 25 bp, synthetic construct
  misc_feature 1..25: note = Oligonucleotide
  source 1..25: mol_type = other DNA
ataggtgccatctgagaaaggaggg

SEQ ID NO: 37385 - DNA, 25 bp, synthetic construct
  misc_feature 1..25: note = Oligonucleotide
  source 1..25: mol_type = other DNA
gaaataggtgccatctgagaaagga

SEQ ID NO: 37386 - DNA, 25 bp, synthetic construct
  misc_feature 1..25: note = Oligonucleotide
  source 1..25: mol_type = other DNA
gttgaaataggtgccatctgagaaa

SEQ ID NO: 37387 - DNA, 25 bp, synthetic construct
  misc_feature 1..25: note = Oligonucleotide
  source 1..25: mol_type = other DNA
agggttgaaataggtgccatctgag

SEQ ID NO: 37388 - DNA, 25 bp, synthetic construct
  misc_feature 1..25: note = Oligonucleotide
  source 1..25: mol_type = other DNA
ggcagggttgaaataggtgccatct

SEQ ID NO: 37389 - DNA, 25 bp, synthetic construct
  misc_feature 1..25: note = Oligonucleotide
  source 1..25: mol_type = other DNA
ggcggcagggttgaaataggtgcca

SEQ ID NO: 37390 - DNA, 25 bp, synthetic construct
  misc_feature 1..25: note = Oligonucleotide
  source 1..25: mol_type = other DNA
tggggcggcagggttgaaataggtg

SEQ ID NO: 37391 - DNA, 25 bp, synthetic construct
  misc_feature 1..25: note = Oligonucleotide
  source 1..25: mol_type = other DNA
ggctggggcggcagggttgaaatag

SEQ ID NO: 37392 - DNA, 25 bp, synthetic construct
  misc_feature 1..25: note = Oligonucleotide
  source 1..25: mol_type = other DNA
ggaggctggggcggcagggttgaaa

SEQ ID NO: 37393 - DNA, 25 bp, synthetic construct
  misc_feature 1..25: note = Oligonucleotide
  source 1..25: mol_type = other DNA
ttgggaggctggggcggcagggttg

SEQ ID NO: 37394 - DNA, 25 bp, synthetic construct
  misc_feature 1..25: note = Oligonucleotide
  source 1..25: mol_type = other DNA
tatttgggaggctggggcggcaggg

SEQ ID NO: 37395 - DNA, 25 bp, synthetic construct
  misc_feature 1..25: note = Oligonucleotide
  source 1..25: mol_type = other DNA
ccatatttgggaggctggggcggca

SEQ ID NO: 37396 - DNA, 25 bp, synthetic construct
  misc_feature 1..25: note = Oligonucleotide
  source 1..25: mol_type = other DNA
gtcccatatttgggaggctggggcg

SEQ ID NO: 37397 - DNA, 25 bp, synthetic construct
  misc_feature 1..25: note = Oligonucleotide
  source 1..25: mol_type = other DNA
aaggtcccatatttgggaggctggg

SEQ ID NO: 37398 - DNA, 25 bp, synthetic construct
  misc_feature 1..25: note = Oligonucleotide
  source 1..25: mol_type = other DNA
gaaaaggtcccatatttgggaggct

SEQ ID NO: 37399 - DNA, 25 bp, synthetic construct
  misc_feature 1..25: note = Oligonucleotide
  source 1..25: mol_type = other DNA
cttgaaaaggtcccatatttgggag

SEQ ID NO: 37400 - DNA, 25 bp, synthetic construct
  misc_feature 1..25: note = Oligonucleotide
  source 1..25: mol_type = other DNA
agccttgaaaaggtcccatatttgg

SEQ ID NO: 37401 - DNA, 25 bp, synthetic construct
  misc_feature 1..25: note = Oligonucleotide
  source 1..25: mol_type = other DNA
cacagccttgaaaaggtcccatatt

SEQ ID NO: 37402 - DNA, 25 bp, synthetic construct
  misc_feature 1..25: note = Oligonucleotide
  source 1..25: mol_type = other DNA
agacacagccttgaaaaggtcccat

SEQ ID NO: 37403 - DNA, 25 bp, synthetic construct
  misc_feature 1..25: note = Oligonucleotide
  source 1..25: mol_type = other DNA
tgaagacacagccttgaaaaggtcc

SEQ ID NO: 37404 - DNA, 25 bp, synthetic construct
  misc_feature 1..25: note = Oligonucleotide
  source 1..25: mol_type = other DNA
ggctgaagacacagccttgaaaagg

SEQ ID NO: 37405 - DNA, 25 bp, synthetic construct
  misc_feature 1..25: note = Oligonucleotide
  source 1..25: mol_type = other DNA
ggaggctgaagacacagccttgaaa

SEQ ID NO: 37406 - DNA, 25 bp, synthetic construct
  misc_feature 1..25: note = Oligonucleotide
  source 1..25: mol_type = other DNA
gaaggaggctgaagacacagccttg

SEQ ID NO: 37407 - DNA, 25 bp, synthetic construct
  misc_feature 1..25: note = Oligonucleotide
  source 1..25: mol_type = other DNA
ggggaaggaggctgaagacacagcc

SEQ ID NO: 37408 - DNA, 25 bp, synthetic construct
  misc_feature 1..25: note = Oligonucleotide
  source 1..25: mol_type = other DNA
agaggggaaggaggctgaagacaca

SEQ ID NO: 37409 - DNA, 25 bp, synthetic construct
  misc_feature 1..25: note = Oligonucleotide
  source 1..25: mol_type = other DNA
cacagaggggaaggaggctgaagac

SEQ ID NO: 37410 - DNA, 25 bp, synthetic construct
  misc_feature 1..25: note = Oligonucleotide
  source 1..25: mol_type = other DNA
aggcacagaggggaaggaggctgaa

SEQ ID NO: 37411 - DNA, 25 bp, synthetic construct
  misc_feature 1..25: note = Oligonucleotide
  source 1..25: mol_type = other DNA
gtgaggcacagaggggaaggaggct

SEQ ID NO: 37412 - DNA, 25 bp, synthetic construct
  misc_feature 1..25: note = Oligonucleotide
  source 1..25: mol_type = other DNA
gtggtgaggcacagaggggaaggag

SEQ ID NO: 37413 - DNA, 25 bp, synthetic construct
  misc_feature 1..25: note = Oligonucleotide
  source 1..25: mol_type = other DNA
ggagtggtgaggcacagaggggaag

SEQ ID NO: 37414 - DNA, 25 bp, synthetic construct
  misc_feature 1..25: note = Oligonucleotide
  source 1..25: mol_type = other DNA
tggggagtggtgaggcacagagggg

SEQ ID NO: 37415 - DNA, 25 bp, synthetic construct
  misc_feature 1..25: note = Oligonucleotide
  source 1..25: mol_type = other DNA
ggctggggagtggtgaggcacagag

SEQ ID NO: 37416 - DNA, 25 bp, synthetic construct
  misc_feature 1..25: note = Oligonucleotide
  source 1..25: mol_type = other DNA
ggtggctggggagtggtgaggcaca

SEQ ID NO: 37417 - DNA, 25 bp, synthetic construct
  misc_feature 1..25: note = Oligonucleotide
  source 1..25: mol_type = other DNA
gatggtggctggggagtggtgaggc

SEQ ID NO: 37418 - DNA, 25 bp, synthetic construct
  misc_feature 1..25: note = Oligonucleotide
  source 1..25: mol_type = other DNA
tgtgatggtggctggggagtggtga

SEQ ID NO: 37419 - DNA, 25 bp, synthetic construct
  misc_feature 1..25: note = Oligonucleotide
  source 1..25: mol_type = other DNA
gagtgtgatggtggctggggagtgg

SEQ ID NO: 37420 - DNA, 25 bp, synthetic construct
  misc_feature 1..25: note = Oligonucleotide
  source 1..25: mol_type = other DNA
gtggagtgtgatggtggctggggag

SEQ ID NO: 37421 - DNA, 25 bp, synthetic construct
  misc_feature 1..25: note = Oligonucleotide
  source 1..25: mol_type = other DNA
agtgtggagtgtgatggtggctggg

SEQ ID NO: 37422 - DNA, 25 bp, synthetic construct
  misc_feature 1..25: note = Oligonucleotide
  source 1..25: mol_type = other DNA
gtgagtgtggagtgtgatggtggct

SEQ ID NO: 37423 - DNA, 25 bp, synthetic construct
  misc_feature 1..25: note = Oligonucleotide
  source 1..25: mol_type = other DNA
acggtgagtgtggagtgtgatggtg

SEQ ID NO: 37424 - DNA, 25 bp, synthetic construct
  misc_feature 1..25: note = Oligonucleotide
  source 1..25: mol_type = other DNA
gagacggtgagtgtggagtgtgatg

SEQ ID NO: 37425 - DNA, 25 bp, synthetic construct
  misc_feature 1..25: note = Oligonucleotide
  source 1..25: mol_type = other DNA
aaggagacggtgagtgtggagtgtg

SEQ ID NO: 37426 - DNA, 25 bp, synthetic construct
  misc_feature 1..25: note = Oligonucleotide
  source 1..25: mol_type = other DNA
ggaaaggagacggtgagtgtggagt

SEQ ID NO: 37427 - DNA, 25 bp, synthetic construct
  misc_feature 1..25: note = Oligonucleotide
  source 1..25: mol_type = other DNA
tcaggaaaggagacggtgagtgtgg

SEQ ID NO: 37428 - DNA, 25 bp, synthetic construct
  misc_feature 1..25: note = Oligonucleotide
  source 1..25: mol_type = other DNA
gggtcaggaaaggagacggtgagtg

SEQ ID NO: 37429 - DNA, 25 bp, synthetic construct
  misc_feature 1..25: note = Oligonucleotide
  source 1..25: mol_type = other DNA
tctgggtcaggaaaggagacggtga

SEQ ID NO: 37430 - DNA, 25 bp, synthetic construct
  misc_feature 1..25: note = Oligonucleotide
  source 1..25: mol_type = other DNA
ccatctgggtcaggaaaggagacgg

SEQ ID NO: 37431 - DNA, 25 bp, synthetic construct
  misc_feature 1..25: note = Oligonucleotide
  source 1..25: mol_type = other DNA
tccccatctgggtcaggaaaggaga

SEQ ID NO: 37432 - DNA, 25 bp, synthetic construct
  misc_feature 1..25: note = Oligonucleotide
  source 1..25: mol_type = other DNA
atgtccccatctgggtcaggaaagg

SEQ ID NO: 37433 - DNA, 25 bp, synthetic construct
  misc_feature 1..25: note = Oligonucleotide
  source 1..25: mol_type = other DNA
tacatgtccccatctgggtcaggaa

SEQ ID NO: 37434 - DNA, 25 bp, synthetic construct
  misc_feature 1..25: note = Oligonucleotide
  source 1..25: mol_type = other DNA
tgttacatgtccccatctgggtcag

SEQ ID NO: 37435 - DNA, 25 bp, synthetic construct
  misc_feature 1..25: note = Oligonucleotide
  source 1..25: mol_type = other DNA
gcttgttacatgtccccatctgggt

SEQ ID NO: 37436 - DNA, 25 bp, synthetic construct
  misc_feature 1..25: note = Oligonucleotide
  source 1..25: mol_type = other DNA
agggcttgttacatgtccccatctg

SEQ ID NO: 37437 - DNA, 25 bp, synthetic construct
  misc_feature 1..25: note = Oligonucleotide
  source 1..25: mol_type = other DNA
ggcagggcttgttacatgtccccat

SEQ ID NO: 37438 - DNA, 25 bp, synthetic construct
  misc_feature 1..25: note = Oligonucleotide
  source 1..25: mol_type = other DNA
gtgggcagggcttgttacatgtccc

SEQ ID NO: 37439 - DNA, 25 bp, synthetic construct
  misc_feature 1..25: note = Oligonucleotide
  source 1..25: mol_type = other DNA
acagtgggcagggcttgttacatgt

SEQ ID NO: 37440 - DNA, 25 bp, synthetic construct
  misc_feature 1..25: note = Oligonucleotide
  source 1..25: mol_type = other DNA
tgcacagtgggcagggcttgttaca

SEQ ID NO: 37441 - DNA, 25 bp, synthetic construct
  misc_feature 1..25: note = Oligonucleotide
  source 1..25: mol_type = other DNA
ggatgcacagtgggcagggcttgtt

SEQ ID NO: 37442 - DNA, 25 bp, synthetic construct
  misc_feature 1..25: note = Oligonucleotide
  source 1..25: mol_type = other DNA
gagggatgcacagtgggcagggctt

SEQ ID NO: 37443 - DNA, 25 bp, synthetic construct
  misc_feature 1..25: note = Oligonucleotide
  source 1..25: mol_type = other DNA
ctggagggatgcacagtgggcaggg

SEQ ID NO: 37444 - DNA, 25 bp, synthetic construct
  misc_feature 1..25: note = Oligonucleotide
  source 1..25: mol_type = other DNA
tgtctggagggatgcacagtgggca

SEQ ID NO: 37445 - DNA, 25 bp, synthetic construct
  misc_feature 1..25: note = Oligonucleotide
  source 1..25: mol_type = other DNA
ggatgtctggagggatgcacagtgg

SEQ ID NO: 37446 - DNA, 25 bp, synthetic construct
  misc_feature 1..25: note = Oligonucleotide
  source 1..25: mol_type = other DNA
agtggatgtctggagggatgcacag

SEQ ID NO: 37447 - DNA, 25 bp, synthetic construct
  misc_feature 1..25: note = Oligonucleotide
  source 1..25: mol_type = other DNA
gagagtggatgtctggagggatgca

SEQ ID NO: 37448 - DNA, 25 bp, synthetic construct
  misc_feature 1..25: note = Oligonucleotide
  source 1..25: mol_type = other DNA
cgggagagtggatgtctggagggat

SEQ ID NO: 37449 - DNA, 25 bp, synthetic construct
  misc_feature 1..25: note = Oligonucleotide
  source 1..25: mol_type = other DNA
ggacgggagagtggatgtctggagg

SEQ ID NO: 37450 - DNA, 25 bp, synthetic construct
  misc_feature 1..25: note = Oligonucleotide
  source 1..25: mol_type = other DNA
aggggacgggagagtggatgtctgg

SEQ ID NO: 37451 - DNA, 25 bp, synthetic construct
  misc_feature 1..25: note = Oligonucleotide
  source 1..25: mol_type = other DNA
ggcaggggacgggagagtggatgtc

SEQ ID NO: 37452 - DNA, 25 bp, synthetic construct
  misc_feature 1..25: note = Oligonucleotide
  source 1..25: mol_type = other DNA
gtgggcaggggacgggagagtggat

SEQ ID NO: 37453 - DNA, 25 bp, synthetic construct
  misc_feature 1..25: note = Oligonucleotide
  source 1..25: mol_type = other DNA
caggtgggcaggggacgggagagtg

SEQ ID NO: 37454 - DNA, 25 bp, synthetic construct
  misc_feature 1..25: note = Oligonucleotide
  source 1..25: mol_type = other DNA
gcacaggtgggcaggggacgggaga

SEQ ID NO: 37455 - DNA, 25 bp, synthetic construct
  misc_feature 1..25: note = Oligonucleotide
  source 1..25: mol_type = other DNA
gatgcacaggtgggcaggggacggg

SEQ ID NO: 37456 - DNA, 25 bp, synthetic construct
  misc_feature 1..25: note = Oligonucleotide
  source 1..25: mol_type = other DNA
acagatgcacaggtgggcaggggac

SEQ ID NO: 37457 - DNA, 25 bp, synthetic construct
  misc_feature 1..25: note = Oligonucleotide
  source 1..25: mol_type = other DNA
tggacagatgcacaggtgggcaggg

SEQ ID NO: 37458 - DNA, 25 bp, synthetic construct
  misc_feature 1..25: note = Oligonucleotide
  source 1..25: mol_type = other DNA
gggtggacagatgcacaggtgggca

SEQ ID NO: 37459 - DNA, 25 bp, synthetic construct
  misc_feature 1..25: note = Oligonucleotide
  source 1..25: mol_type = other DNA
tgtgggtggacagatgcacaggtgg

SEQ ID NO: 37460 - DNA, 25 bp, synthetic construct
  misc_feature 1..25: note = Oligonucleotide
  source 1..25: mol_type = other DNA
gtgtgtgggtggacagatgcacagg

SEQ ID NO: 37461 - DNA, 25 bp, synthetic construct
  misc_feature 1..25: note = Oligonucleotide
  source 1..25: mol_type = other DNA
caggtgtgtgggtggacagatgcac

SEQ ID NO: 37462 - DNA, 25 bp, synthetic construct
  misc_feature 1..25: note = Oligonucleotide
  source 1..25: mol_type = other DNA
gggcaggtgtgtgggtggacagatg

SEQ ID NO: 37463 - DNA, 25 bp, synthetic construct
  misc_feature 1..25: note = Oligonucleotide
  source 1..25: mol_type = other DNA
agtgggcaggtgtgtgggtggacag

SEQ ID NO: 37464 - DNA, 25 bp, synthetic construct
  misc_feature 1..25: note = Oligonucleotide
  source 1..25: mol_type = other DNA
tcaagtgggcaggtgtgtgggtgga

SEQ ID NO: 37465 - DNA, 25 bp, synthetic construct
  misc_feature 1..25: note = Oligonucleotide
  source 1..25: mol_type = other DNA
cggtcaagtgggcaggtgtgtgggt

SEQ ID NO: 37466 - DNA, 25 bp, synthetic construct
  misc_feature 1..25: note = Oligonucleotide
  source 1..25: mol_type = other DNA
ggacggtcaagtgggcaggtgtgtg

SEQ ID NO: 37467 - DNA, 25 bp, synthetic construct
  misc_feature 1..25: note = Oligonucleotide
  source 1..25: mol_type = other DNA
aacggacggtcaagtgggcaggtgt

SEQ ID NO: 37468 - DNA, 25 bp, synthetic construct
  misc_feature 1..25: note = Oligonucleotide
  source 1..25: mol_type = other DNA
gacaacggacggtcaagtgggcagg

SEQ ID NO: 37469 - DNA, 25 bp, synthetic construct
  misc_feature 1..25: note = Oligonucleotide
  source 1..25: mol_type = other DNA
atggacaacggacggtcaagtgggc

SEQ ID NO: 37470 - DNA, 25 bp, synthetic construct
  misc_feature 1..25: note = Oligonucleotide
  source 1..25: mol_type = other DNA
tgtatggacaacggacggtcaagtg

SEQ ID NO: 37471 - DNA, 25 bp, synthetic construct
  misc_feature 1..25: note = Oligonucleotide
  source 1..25: mol_type = other DNA
gtttgtatggacaacggacggtcaa

SEQ ID NO: 37472 - DNA, 25 bp, synthetic construct
  misc_feature 1..25: note = Oligonucleotide
  source 1..25: mol_type = other DNA
ggggtttgtatggacaacggacggt

SEQ ID NO: 37473 - DNA, 25 bp, synthetic construct
  misc_feature 1..25: note = Oligonucleotide
  source 1..25: mol_type = other DNA
gctggggtttgtatggacaacggac

SEQ ID NO: 37474 - DNA, 25 bp, synthetic construct
  misc_feature 1..25: note = Oligonucleotide
  source 1..25: mol_type = other DNA
tgtgctggggtttgtatggacaacg

SEQ ID NO: 37475 - DNA, 25 bp, synthetic construct
  misc_feature 1..25: note = Oligonucleotide
  source 1..25: mol_type = other DNA
aggtgtgctggggtttgtatggaca

SEQ ID NO: 37476 - DNA, 25 bp, synthetic construct
  misc_feature 1..25: note = Oligonucleotide
  source 1..25: mol_type = other DNA
gggaggtgtgctggggtttgtatgg

SEQ ID NO: 37477 - DNA, 25 bp, synthetic construct
  misc_feature 1..25: note = Oligonucleotide
  source 1..25: mol_type = other DNA
gatgggaggtgtgctggggtttgta

SEQ ID NO: 37478 - DNA, 25 bp, synthetic construct
  misc_feature 1..25: note = Oligonucleotide
  source 1..25: mol_type = other DNA
acagatgggaggtgtgctggggttt

SEQ ID NO: 37479 - DNA, 25 bp, synthetic construct
  misc_feature 1..25: note = Oligonucleotide
  source 1..25: mol_type = other DNA
gtaacagatgggaggtgtgctgggg

SEQ ID NO: 37480 - DNA, 25 bp, synthetic construct
  misc_feature 1..25: note = Oligonucleotide
  source 1..25: mol_type = other DNA
tgtgtaacagatgggaggtgtgctg

SEQ ID NO: 37481 - DNA, 25 bp, synthetic construct
  misc_feature 1..25: note = Oligonucleotide
  source 1..25: mol_type = other DNA
ctatgtgtaacagatgggaggtgtg

SEQ ID NO: 37482 - DNA, 25 bp, synthetic construct
  misc_feature 1..25: note = Oligonucleotide
  source 1..25: mol_type = other DNA
ctcctatgtgtaacagatgggaggt

SEQ ID NO: 37483 - DNA, 25 bp, synthetic construct
  misc_feature 1..25: note = Oligonucleotide
  source 1..25: mol_type = other DNA
ttactcctatgtgtaacagatggga

SEQ ID NO: 37484 - DNA, 25 bp, synthetic construct
  misc_feature 1..25: note = Oligonucleotide
  source 1..25: mol_type = other DNA
ggtttactcctatgtgtaacagatg

SEQ ID NO: 37485 - DNA, 25 bp, synthetic construct
  misc_feature 1..25: note = Oligonucleotide
  source 1..25: mol_type = other DNA
agaggtttactcctatgtgtaacag

SEQ ID NO: 37486 - DNA, 25 bp, synthetic construct
  misc_feature 1..25: note = Oligonucleotide
  source 1..25: mol_type = other DNA
ctgagaggtttactcctatgtgtaa

SEQ ID NO: 37487 - DNA, 25 bp, synthetic construct
  misc_feature 1..25: note = Oligonucleotide
  source 1..25: mol_type = other DNA
gtgctgagaggtttactcctatgtg

SEQ ID NO: 37488 - DNA, 25 bp, synthetic construct
  misc_feature 1..25: note = Oligonucleotide
  source 1..25: mol_type = other DNA
taagtgctgagaggtttactcctat

SEQ ID NO: 37489 - DNA, 25 bp, synthetic construct
  misc_feature 1..25: note = Oligonucleotide
  source 1..25: mol_type = other DNA
tagtaagtgctgagaggtttactcc

SEQ ID NO: 37490 - DNA, 25 bp, synthetic construct
  misc_feature 1..25: note = Oligonucleotide
  source 1..25: mol_type = other DNA
ccgtagtaagtgctgagaggtttac

SEQ ID NO: 37491 - DNA, 25 bp, synthetic construct
  misc_feature 1..25: note = Oligonucleotide
  source 1..25: mol_type = other DNA
agcccgtagtaagtgctgagaggtt

SEQ ID NO: 37492 - DNA, 25 bp, synthetic construct
  misc_feature 1..25: note = Oligonucleotide
  source 1..25: mol_type = other DNA
tccagcccgtagtaagtgctgagag

SEQ ID NO: 37493 - DNA, 25 bp, synthetic construct
  misc_feature 1..25: note = Oligonucleotide
  source 1..25: mol_type = other DNA
gtgtccagcccgtagtaagtgctga

SEQ ID NO: 37494 - DNA, 25 bp, synthetic construct
  misc_feature 1..25: note = Oligonucleotide
  source 1..25: mol_type = other DNA
tcagtgtccagcccgtagtaagtgc

SEQ ID NO: 37495 - DNA, 25 bp, synthetic construct
  misc_feature 1..25: note = Oligonucleotide
  source 1..25: mol_type = other DNA
tgctcagtgtccagcccgtagtaag

SEQ ID NO: 37496 - DNA, 25 bp, synthetic construct
  misc_feature 1..25: note = Oligonucleotide
  source 1..25: mol_type = other DNA
aaatgctcagtgtccagcccgtagt

SEQ ID NO: 37497 - DNA, 25 bp, synthetic construct
  misc_feature 1..25: note = Oligonucleotide
  source 1..25: mol_type = other DNA
attaaatgctcagtgtccagcccgt

SEQ ID NO: 37498 - DNA, 25 bp, synthetic construct
  misc_feature 1..25: note = Oligonucleotide
  source 1..25: mol_type = other DNA
agtattaaatgctcagtgtccagcc

SEQ ID NO: 37499 - DNA, 25 bp, synthetic construct
  misc_feature 1..25: note = Oligonucleotide
  source 1..25: mol_type = other DNA
ctaagtattaaatgctcagtgtcca

SEQ ID NO: 37500 - DNA, 25 bp, synthetic construct
  misc_feature 1..25: note = Oligonucleotide
  source 1..25: mol_type = other DNA
attctaagtattaaatgctcagtgt

SEQ ID NO: 37501 - DNA, 25 bp, synthetic construct
  misc_feature 1..25: note = Oligonucleotide
  source 1..25: mol_type = other DNA
gttattctaagtattaaatgctcag

SEQ ID NO: 37502 - DNA, 25 bp, synthetic construct
  misc_feature 1..25: note = Oligonucleotide
  source 1..25: mol_type = other DNA
atggttattctaagtattaaatgct

SEQ ID NO: 37503 - DNA, 25 bp, synthetic construct
  misc_feature 1..25: note = Oligonucleotide
  source 1..25: mol_type = other DNA
aatatggttattctaagtattaaat

SEQ ID NO: 37504 - DNA, 25 bp, synthetic construct
  misc_feature 1..25: note = Oligonucleotide
  source 1..25: mol_type = other DNA
ctcaatatggttattctaagtatta

SEQ ID NO: 37505 - DNA, 25 bp, synthetic construct
  misc_feature 1..25: note = Oligonucleotide
  source 1..25: mol_type = other DNA
aacctcaatatggttattctaagta

SEQ ID NO: 37506 - DNA, 25 bp, synthetic construct
  misc_feature 1..25: note = Oligonucleotide
  source 1..25: mol_type = other DNA
ctcaacctcaatatggttattctaa

SEQ ID NO: 37507 - DNA, 25 bp, synthetic construct
  misc_feature 1..25: note = Oligonucleotide
  source 1..25: mol_type = other DNA
ggtctcaacctcaatatggttattc

SEQ ID NO: 37508 - DNA, 25 bp, synthetic construct
  misc_feature 1..25: note = Oligonucleotide
  source 1..25: mol_type = other DNA
agtggtctcaacctcaatatggtta

SEQ ID NO: 37509 - DNA, 25 bp, synthetic construct
  misc_feature 1..25: note = Oligonucleotide
  source 1..25: mol_type = other DNA
actagtggtctcaacctcaatatgg

SEQ ID NO: 37510 - DNA, 25 bp, synthetic construct
  misc_feature 1..25: note = Oligonucleotide
  source 1..25: mol_type = other DNA
ggtactagtggtctcaacctcaata

SEQ ID NO: 37511 - DNA, 25 bp, synthetic construct
  misc_feature 1..25: note = Oligonucleotide
  source 1..25: mol_type = other DNA
ggaggtactagtggtctcaacctca

SEQ ID NO: 37512 - DNA, 25 bp, synthetic construct
  misc_feature 1..25: note = Oligonucleotide
  source 1..25: mol_type = other DNA
aatggaggtactagtggtctcaacc

SEQ ID NO: 37513 - DNA, 25 bp, synthetic construct
  misc_feature 1..25: note = Oligonucleotide
  source 1..25: mol_type = other DNA
taaaatggaggtactagtggtctca

SEQ ID NO: 37514 - DNA, 25 bp, synthetic construct
  misc_feature 1..25: note = Oligonucleotide
  source 1..25: mol_type = other DNA
ctgtaaaatggaggtactagtggtc

SEQ ID NO: 37515 - DNA, 25 bp, synthetic construct
  misc_feature 1..25: note = Oligonucleotide
  source 1..25: mol_type = other DNA
catctgtaaaatggaggtactagtg

SEQ ID NO: 37516 - DNA, 25 bp, synthetic construct
  misc_feature 1..25: note = Oligonucleotide
  source 1..25: mol_type = other DNA
tctcatctgtaaaatggaggtacta

SEQ ID NO: 37517 - DNA, 25 bp, synthetic construct
  misc_feature 1..25: note = Oligonucleotide
  source 1..25: mol_type = other DNA
ttttctcatctgtaaaatggaggta

SEQ ID NO: 37518 - DNA, 25 bp, synthetic construct
  misc_feature 1..25: note = Oligonucleotide
  source 1..25: mol_type = other DNA
cagttttctcatctgtaaaatggag

SEQ ID NO: 37519 - DNA, 25 bp, synthetic construct
  misc_feature 1..25: note = Oligonucleotide
  source 1..25: mol_type = other DNA
cttcagttttctcatctgtaaaatg

SEQ ID NO: 37520 - DNA, 25 bp, synthetic construct
  misc_feature 1..25: note = Oligonucleotide
  source 1..25: mol_type = other DNA
ttgcttcagttttctcatctgtaaa

SEQ ID NO: 37521 - DNA, 25 bp, synthetic construct
  misc_feature 1..25: note = Oligonucleotide
  source 1..25: mol_type = other DNA
tccttgcttcagttttctcatctgt

SEQ ID NO: 37522 - DNA, 25 bp, synthetic construct
  misc_feature 1..25: note = Oligonucleotide
  source 1..25: mol_type = other DNA
ccctccttgcttcagttttctcatc

SEQ ID NO: 37523 - DNA, 25 bp, synthetic construct
  misc_feature 1..25: note = Oligonucleotide
  source 1..25: mol_type = other DNA
ttaccctccttgcttcagttttctc

SEQ ID NO: 37524 - DNA, 25 bp, synthetic construct
  misc_feature 1..25: note = Oligonucleotide
  source 1..25: mol_type = other DNA
catttaccctccttgcttcagtttt

SEQ ID NO: 37525 - DNA, 25 bp, synthetic construct
  misc_feature 1..25: note = Oligonucleotide
  source 1..25: mol_type = other DNA
ggtcatttaccctccttgcttcagt

SEQ ID NO: 37526 - DNA, 25 bp, synthetic construct
  misc_feature 1..25: note = Oligonucleotide
  source 1..25: mol_type = other DNA
gcaggtcatttaccctccttgcttc

SEQ ID NO: 37527 - DNA, 25 bp, synthetic construct
  misc_feature 1..25: note = Oligonucleotide
  source 1..25: mol_type = other DNA
tgggcaggtcatttaccctccttgc

SEQ ID NO: 37528 - DNA, 25 bp, synthetic construct
  misc_feature 1..25: note = Oligonucleotide
  source 1..25: mol_type = other DNA
tcttgggcaggtcatttaccctcct

SEQ ID NO: 37529 - DNA, 25 bp, synthetic construct
  misc_feature 1..25: note = Oligonucleotide
  source 1..25: mol_type = other DNA
tgatcttgggcaggtcatttaccct

SEQ ID NO: 37530 - DNA, 25 bp, synthetic construct
  misc_feature 1..25: note = Oligonucleotide
  source 1..25: mol_type = other DNA
gtgtgatcttgggcaggtcatttac

SEQ ID NO: 37531 - DNA, 25 bp, synthetic construct
  misc_feature 1..25: note = Oligonucleotide
  source 1..25: mol_type = other DNA
gctgtgtgatcttgggcaggtcatt

SEQ ID NO: 37532 - DNA, 25 bp, synthetic construct
  misc_feature 1..25: note = Oligonucleotide
  source 1..25: mol_type = other DNA
gcagctgtgtgatcttgggcaggtc

SEQ ID NO: 37533 - DNA, 25 bp, synthetic construct
  misc_feature 1..25: note = Oligonucleotide
  source 1..25: mol_type = other DNA
tgggcagctgtgtgatcttgggcag

SEQ ID NO: 37534 - DNA, 25 bp, synthetic construct
  misc_feature 1..25: note = Oligonucleotide
  source 1..25: mol_type = other DNA
gtttgggcagctgtgtgatcttggg

SEQ ID NO: 37535 - DNA, 25 bp, synthetic construct
  misc_feature 1..25: note = Oligonucleotide
  source 1..25: mol_type = other DNA
cgagtttgggcagctgtgtgatctt

SEQ ID NO: 37536 - DNA, 25 bp, synthetic construct
  misc_feature 1..25: note = Oligonucleotide
  source 1..25: mol_type = other DNA
atccgagtttgggcagctgtgtgat

SEQ ID NO: 37537 - DNA, 25 bp, synthetic construct
  misc_feature 1..25: note = Oligonucleotide
  source 1..25: mol_type = other DNA
ggaatccgagtttgggcagctgtgt

SEQ ID NO: 37538 - DNA, 25 bp, synthetic construct
  misc_feature 1..25: note = Oligonucleotide
  source 1..25: mol_type = other DNA
tgaggaatccgagtttgggcagctg

SEQ ID NO: 37539 - DNA, 25 bp, synthetic construct
  misc_feature 1..25: note = Oligonucleotide
  source 1..25: mol_type = other DNA
aggtgaggaatccgagtttgggcag

SEQ ID NO: 37540 - DNA, 25 bp, synthetic construct
  misc_feature 1..25: note = Oligonucleotide
  source 1..25: mol_type = other DNA
ggcaggtgaggaatccgagtttggg

SEQ ID NO: 37541 - DNA, 25 bp, synthetic construct
  misc_feature 1..25: note = Oligonucleotide
  source 1..25: mol_type = other DNA
tgaggcaggtgaggaatccgagttt

SEQ ID NO: 37542 - DNA, 25 bp, synthetic construct
  misc_feature 1..25: note = Oligonucleotide
  source 1..25: mol_type = other DNA
tcctgaggcaggtgaggaatccgag

SEQ ID NO: 37543 - DNA, 25 bp, synthetic construct
  misc_feature 1..25: note = Oligonucleotide
  source 1..25: mol_type = other DNA
gggtcctgaggcaggtgaggaatcc

SEQ ID NO: 37544 - DNA, 25 bp, synthetic construct
  misc_feature 1..25: note = Oligonucleotide
  source 1..25: mol_type = other DNA
gcagggtcctgaggcaggtgaggaa

SEQ ID NO: 37545 - DNA, 25 bp, synthetic construct
  misc_feature 1..25: note = Oligonucleotide
  source 1..25: mol_type = other DNA
ttggcagggtcctgaggcaggtgag

SEQ ID NO: 37546 - DNA, 25 bp, synthetic construct
  misc_feature 1..25: note = Oligonucleotide
  source 1..25: mol_type = other DNA
aaattggcagggtcctgaggcaggt

SEQ ID NO: 37547 - DNA, 25 bp, synthetic construct
  misc_feature 1..25: note = Oligonucleotide
  source 1..25: mol_type = other DNA
cacaaattggcagggtcctgaggca

SEQ ID NO: 37548 - DNA, 25 bp, synthetic construct
  misc_feature 1..25: note = Oligonucleotide
  source 1..25: mol_type = other DNA
gaacacaaattggcagggtcctgag

SEQ ID NO: 37549 - DNA, 25 bp, synthetic construct
  misc_feature 1..25: note = Oligonucleotide
  source 1..25: mol_type = other DNA
tgtgaacacaaattggcagggtcct

SEQ ID NO: 37550 - DNA, 25 bp, synthetic construct
  misc_feature 1..25: note = Oligonucleotide
  source 1..25: mol_type = other DNA
ttgtgtgaacacaaattggcagggt

SEQ ID NO: 37551 - DNA, 25 bp, synthetic construct
  misc_feature 1..25: note = Oligonucleotide
  source 1..25: mol_type = other DNA
gccttgtgtgaacacaaattggcag

SEQ ID NO: 37552 - DNA, 25 bp, synthetic construct
  misc_feature 1..25: note = Oligonucleotide
  source 1..25: mol_type = other DNA
tcggccttgtgtgaacacaaattgg

SEQ ID NO: 37553 - DNA, 25 bp, synthetic construct
  misc_feature 1..25: note = Oligonucleotide
  source 1..25: mol_type = other DNA
ggatcggccttgtgtgaacacaaat

SEQ ID NO: 37554 - DNA, 25 bp, synthetic construct
  misc_feature 1..25: note = Oligonucleotide
  source 1..25: mol_type = other DNA
ccaggatcggccttgtgtgaacaca

SEQ ID NO: 37555 - DNA, 25 bp, synthetic construct
  misc_feature 1..25: note = Oligonucleotide
  source 1..25: mol_type = other DNA
ggcccaggatcggccttgtgtgaac

SEQ ID NO: 37556 - DNA, 25 bp, synthetic construct
  misc_feature 1..25: note = Oligonucleotide
  source 1..25: mol_type = other DNA
cttggcccaggatcggccttgtgtg

SEQ ID NO: 37557 - DNA, 25 bp, synthetic construct
  misc_feature 1..25: note = Oligonucleotide
  source 1..25: mol_type = other DNA
agacttggcccaggatcggccttgt

SEQ ID NO: 37558 - DNA, 25 bp, synthetic construct
  misc_feature 1..25: note = Oligonucleotide
  source 1..25: mol_type = other DNA
cccagacttggcccaggatcggcct

SEQ ID NO: 37559 - DNA, 25 bp, synthetic construct
  misc_feature 1..25: note = Oligonucleotide
  source 1..25: mol_type = other DNA
agccccagacttggcccaggatcgg

SEQ ID NO: 37560 - DNA, 25 bp, synthetic construct
  misc_feature 1..25: note = Oligonucleotide
  source 1..25: mol_type = other DNA
ccaagccccagacttggcccaggat

SEQ ID NO: 37561 - DNA, 25 bp, synthetic construct
  misc_feature 1..25: note = Oligonucleotide
  source 1..25: mol_type = other DNA
taaccaagccccagacttggcccag

SEQ ID NO: 37562 - DNA, 25 bp, synthetic construct
  misc_feature 1..25: note = Oligonucleotide
  source 1..25: mol_type = other DNA
ccctaaccaagccccagacttggcc

SEQ ID NO: 37563 - DNA, 25 bp, synthetic construct
  misc_feature 1..25: note = Oligonucleotide
  source 1..25: mol_type = other DNA
attccctaaccaagccccagacttg

SEQ ID NO: 37564 - DNA, 25 bp, synthetic construct
  misc_feature 1..25: note = Oligonucleotide
  source 1..25: mol_type = other DNA
cacattccctaaccaagccccagac

SEQ ID NO: 37565 - DNA, 25 bp, synthetic construct
  misc_feature 1..25: note = Oligonucleotide
  source 1..25: mol_type = other DNA
cgtcacattccctaaccaagcccca

SEQ ID NO: 37566 - DNA, 25 bp, synthetic construct
  misc_feature 1..25: note = Oligonucleotide
  source 1..25: mol_type = other DNA
acacgtcacattccctaaccaagcc

SEQ ID NO: 37567 - DNA, 25 bp, synthetic construct
  misc_feature 1..25: note = Oligonucleotide
  source 1..25: mol_type = other DNA
tgcacacgtcacattccctaaccaa

SEQ ID NO: 37568 - DNA, 25 bp, synthetic construct
  misc_feature 1..25: note = Oligonucleotide
  source 1..25: mol_type = other DNA
ctctgcacacgtcacattccctaac

SEQ ID NO: 37569 - DNA, 25 bp, synthetic construct
  misc_feature 1..25: note = Oligonucleotide
  source 1..25: mol_type = other DNA
gctctctgcacacgtcacattccct

SEQ ID NO: 37570 - DNA, 25 bp, synthetic construct
  misc_feature 1..25: note = Oligonucleotide
  source 1..25: mol_type = other DNA
tgagctctctgcacacgtcacattc

SEQ ID NO: 37571 - DNA, 25 bp, synthetic construct
  misc_feature 1..25: note = Oligonucleotide
  source 1..25: mol_type = other DNA
cgctgagctctctgcacacgtcaca

SEQ ID NO: 37572 - DNA, 25 bp, synthetic construct
  misc_feature 1..25: note = Oligonucleotide
  source 1..25: mol_type = other DNA
gcccgctgagctctctgcacacgtc

SEQ ID NO: 37573 - DNA, 25 bp, synthetic construct
  misc_feature 1..25: note = Oligonucleotide
  source 1..25: mol_type = other DNA
tgtgcccgctgagctctctgcacac

SEQ ID NO: 37574 - DNA, 25 bp, synthetic construct
  misc_feature 1..25: note = Oligonucleotide
  source 1..25: mol_type = other DNA
caatgtgcccgctgagctctctgca

SEQ ID NO: 37575 - DNA, 25 bp, synthetic construct
  misc_feature 1..25: note = Oligonucleotide
  source 1..25: mol_type = other DNA
ccacaatgtgcccgctgagctctct

SEQ ID NO: 37576 - DNA, 25 bp, synthetic construct
  misc_feature 1..25: note = Oligonucleotide
  source 1..25: mol_type = other DNA
cacccacaatgtgcccgctgagctc

SEQ ID NO: 37577 - DNA, 25 bp, synthetic construct
  misc_feature 1..25: note = Oligonucleotide
  source 1..25: mol_type = other DNA
tggcacccacaatgtgcccgctgag

SEQ ID NO: 37578 - DNA, 25 bp, synthetic construct
  misc_feature 1..25: note = Oligonucleotide
  source 1..25: mol_type = other DNA
ccctggcacccacaatgtgcccgct

SEQ ID NO: 37579 - DNA, 25 bp, synthetic construct
  misc_feature 1..25: note = Oligonucleotide
  source 1..25: mol_type = other DNA
gagccctggcacccacaatgtgccc

SEQ ID NO: 37580 - DNA, 25 bp, synthetic construct
  misc_feature 1..25: note = Oligonucleotide
  source 1..25: mol_type = other DNA
cgtgagccctggcacccacaatgtg

SEQ ID NO: 37581 - DNA, 25 bp, synthetic construct
  misc_feature 1..25: note = Oligonucleotide
  source 1..25: mol_type = other DNA
gtccgtgagccctggcacccacaat

SEQ ID NO: 37582 - DNA, 25 bp, synthetic construct
  misc_feature 1..25: note = Oligonucleotide
  source 1..25: mol_type = other DNA
ttggtccgtgagccctggcacccac

SEQ ID NO: 37583 - DNA, 25 bp, synthetic construct
  misc_feature 1..25: note = Oligonucleotide
  source 1..25: mol_type = other DNA
ccattggtccgtgagccctggcacc

SEQ ID NO: 37584 - DNA, 25 bp, synthetic construct
  misc_feature 1..25: note = Oligonucleotide
  source 1..25: mol_type = other DNA
gctccattggtccgtgagccctggc

SEQ ID NO: 37585 - DNA, 25 bp, synthetic construct
  misc_feature 1..25: note = Oligonucleotide
  source 1..25: mol_type = other DNA
tgggctccattggtccgtgagccct

SEQ ID NO: 37586 - DNA, 25 bp, synthetic construct
  misc_feature 1..25: note = Oligonucleotide
  source 1..25: mol_type = other DNA
cagtgggctccattggtccgtgagc

SEQ ID NO: 37587 - DNA, 25 bp, synthetic construct
  misc_feature 1..25: note = Oligonucleotide
  source 1..25: mol_type = other DNA
ccccagtgggctccattggtccgtg

SEQ ID NO: 37588 - DNA, 25 bp, synthetic construct
  misc_feature 1..25: note = Oligonucleotide
  source 1..25: mol_type = other DNA
gccccccagtgggctccattggtcc

SEQ ID NO: 37589 - DNA, 25 bp, synthetic construct
  misc_feature 1..25: note = Oligonucleotide
  source 1..25: mol_type = other DNA
ggagccccccagtgggctccattgg

SEQ ID NO: 37590 - DNA, 25 bp, synthetic construct
  misc_feature 1..25: note = Oligonucleotide
  source 1..25: mol_type = other DNA
cttggagccccccagtgggctccat

SEQ ID NO: 37591 - DNA, 25 bp, synthetic construct
  misc_feature 1..25: note = Oligonucleotide
  source 1..25: mol_type = other DNA
gtgcttggagccccccagtgggctc

SEQ ID NO: 37592 - DNA, 25 bp, synthetic construct
  misc_feature 1..25: note = Oligonucleotide
  source 1..25: mol_type = other DNA
ggtgtgcttggagccccccagtggg

SEQ ID NO: 37593 - DNA, 25 bp, synthetic construct
  misc_feature 1..25: note = Oligonucleotide
  source 1..25: mol_type = other DNA
ccaggtgtgcttggagccccccagt

SEQ ID NO: 37594 - DNA, 25 bp, synthetic construct
  misc_feature 1..25: note = Oligonucleotide
  source 1..25: mol_type = other DNA
acaccaggtgtgcttggagcccccc

SEQ ID NO: 37595 - DNA, 25 bp, synthetic construct
  misc_feature 1..25: note = Oligonucleotide
  source 1..25: mol_type = other DNA
gtgacaccaggtgtgcttggagccc

SEQ ID NO: 37596 - DNA, 25 bp, synthetic construct
  misc_feature 1..25: note = Oligonucleotide
  source 1..25: mol_type = other DNA
tctgtgacaccaggtgtgcttggag

SEQ ID NO: 37597 - DNA, 25 bp, synthetic construct
  misc_feature 1..25: note = Oligonucleotide
  source 1..25: mol_type = other DNA
ccttctgtgacaccaggtgtgcttg

SEQ ID NO: 37598 - DNA, 25 bp, synthetic construct
  misc_feature 1..25: note = Oligonucleotide
  source 1..25: mol_type = other DNA
cagccttctgtgacaccaggtgtgc

SEQ ID NO: 37599 - DNA, 25 bp, synthetic construct
  misc_feature 1..25: note = Oligonucleotide
  source 1..25: mol_type = other DNA
acacagccttctgtgacaccaggtg

SEQ ID NO: 37600 - DNA, 25 bp, synthetic construct
  misc_feature 1..25: note = Oligonucleotide
  source 1..25: mol_type = other DNA
cacacacagccttctgtgacaccag

SEQ ID NO: 37601 - DNA, 25 bp, synthetic construct
  misc_feature 1..25: note = Oligonucleotide
  source 1..25: mol_type = other DNA
cgacacacacagccttctgtgacac

SEQ ID NO: 37602 - DNA, 25 bp, synthetic construct
  misc_feature 1..25: note = Oligonucleotide
  source 1..25: mol_type = other DNA
ccccgacacacacagccttctgtga

SEQ ID NO: 37603 - DNA, 25 bp, synthetic construct
  misc_feature 1..25: note = Oligonucleotide
  source 1..25: mol_type = other DNA
ccaccccgacacacacagccttctg

SEQ ID NO: 37604 - DNA, 25 bp, synthetic construct
  misc_feature 1..25: note = Oligonucleotide
  source 1..25: mol_type = other DNA
cccccaccccgacacacacagcctt

SEQ ID NO: 37605 - DNA, 25 bp, synthetic construct
  misc_feature 1..25: note = Oligonucleotide
  source 1..25: mol_type = other DNA
gtacccccaccccgacacacacagc

SEQ ID NO: 37606 - DNA, 25 bp, synthetic construct
  misc_feature 1..25: note = Oligonucleotide
  source 1..25: mol_type = other DNA
aaagtacccccaccccgacacacac

SEQ ID NO: 37607 - DNA, 25 bp, synthetic construct
  misc_feature 1..25: note = Oligonucleotide
  source 1..25: mol_type = other DNA
tcaaaagtacccccaccccgacaca

SEQ ID NO: 37608 - DNA, 25 bp, synthetic construct
  misc_feature 1..25: note = Oligonucleotide
  source 1..25: mol_type = other DNA
agctcaaaagtacccccaccccgac

SEQ ID NO: 37609 - DNA, 25 bp, synthetic construct
  misc_feature 1..25: note = Oligonucleotide
  source 1..25: mol_type = other DNA
cttagctcaaaagtacccccacccc

SEQ ID NO: 37610 - DNA, 25 bp, synthetic construct
  misc_feature 1..25: note = Oligonucleotide
  source 1..25: mol_type = other DNA
catcttagctcaaaagtacccccac

SEQ ID NO: 37611 - DNA, 25 bp, synthetic construct
  misc_feature 1..25: note = Oligonucleotide
  source 1..25: mol_type = other DNA
gcacatcttagctcaaaagtacccc

SEQ ID NO: 37612 - DNA, 25 bp, synthetic construct
  misc_feature 1..25: note = Oligonucleotide
  source 1..25: mol_type = other DNA
cttgcacatcttagctcaaaagtac

SEQ ID NO: 37613 - DNA, 25 bp, synthetic construct
  misc_feature 1..25: note = Oligonucleotide
  source 1..25: mol_type = other DNA
tatcttgcacatcttagctcaaaag

SEQ ID NO: 37614 - DNA, 25 bp, synthetic construct
  misc_feature 1..25: note = Oligonucleotide
  source 1..25: mol_type = other DNA
atttatcttgcacatcttagctcaa

SEQ ID NO: 37615 - DNA, 25 bp, synthetic construct
  misc_feature 1..25: note = Oligonucleotide
  source 1..25: mol_type = other DNA
cccatttatcttgcacatcttagct

SEQ ID NO: 37616 - DNA, 25 bp, synthetic construct
  misc_feature 1..25: note = Oligonucleotide
  source 1..25: mol_type = other DNA
actcccatttatcttgcacatctta

SEQ ID NO: 37617 - DNA, 25 bp, synthetic construct
  misc_feature 1..25: note = Oligonucleotide
  source 1..25: mol_type = other DNA
gaaactcccatttatcttgcacatc

SEQ ID NO: 37618 - DNA, 25 bp, synthetic construct
  misc_feature 1..25: note = Oligonucleotide
  source 1..25: mol_type = other DNA
ccagaaactcccatttatcttgcac

SEQ ID NO: 37619 - DNA, 25 bp, synthetic construct
  misc_feature 1..25: note = Oligonucleotide
  source 1..25: mol_type = other DNA
cgcccagaaactcccatttatcttg

SEQ ID NO: 37620 - DNA, 25 bp, synthetic construct
  misc_feature 1..25: note = Oligonucleotide
  source 1..25: mol_type = other DNA
tatcgcccagaaactcccatttatc

SEQ ID NO: 37621 - DNA, 25 bp, synthetic construct
  misc_feature 1..25: note = Oligonucleotide
  source 1..25: mol_type = other DNA
cattatcgcccagaaactcccattt

SEQ ID NO: 37622 - DNA, 25 bp, synthetic construct
  misc_feature 1..25: note = Oligonucleotide
  source 1..25: mol_type = other DNA
ccccattatcgcccagaaactccca

SEQ ID NO: 37623 - DNA, 25 bp, synthetic construct
  misc_feature 1..25: note = Oligonucleotide
  source 1..25: mol_type = other DNA
tcaccccattatcgcccagaaactc

SEQ ID NO: 37624 - DNA, 25 bp, synthetic construct
  misc_feature 1..25: note = Oligonucleotide
  source 1..25: mol_type = other DNA
agttcaccccattatcgcccagaaa

SEQ ID NO: 37625 - DNA, 25 bp, synthetic construct
  misc_feature 1..25: note = Oligonucleotide
  source 1..25: mol_type = other DNA
gtcagttcaccccattatcgcccag

SEQ ID NO: 37626 - DNA, 25 bp, synthetic construct
  misc_feature 1..25: note = Oligonucleotide
  source 1..25: mol_type = other DNA
tctgtcagttcaccccattatcgcc

SEQ ID NO: 37627 - DNA, 25 bp, synthetic construct
  misc_feature 1..25: note = Oligonucleotide
  source 1..25: mol_type = other DNA
tgctctgtcagttcaccccattatc

SEQ ID NO: 37628 - DNA, 25 bp, synthetic construct
  misc_feature 1..25: note = Oligonucleotide
  source 1..25: mol_type = other DNA
cactgctctgtcagttcaccccatt

SEQ ID NO: 37629 - DNA, 25 bp, synthetic construct
  misc_feature 1..25: note = Oligonucleotide
  source 1..25: mol_type = other DNA
ccacactgctctgtcagttcacccc

SEQ ID NO: 37630 - DNA, 25 bp, synthetic construct
  misc_feature 1..25: note = Oligonucleotide
  source 1..25: mol_type = other DNA
tttccacactgctctgtcagttcac

SEQ ID NO: 37631 - DNA, 25 bp, synthetic construct
  misc_feature 1..25: note = Oligonucleotide
  source 1..25: mol_type = other DNA
ccttttccacactgctctgtcagtt

SEQ ID NO: 37632 - DNA, 25 bp, synthetic construct
  misc_feature 1..25: note = Oligonucleotide
  source 1..25: mol_type = other DNA
atgccttttccacactgctctgtca

SEQ ID NO: 37633 - DNA, 25 bp, synthetic construct
  misc_feature 1..25: note = Oligonucleotide
  source 1..25: mol_type = other DNA
catatgccttttccacactgctctg

SEQ ID NO: 37634 - DNA, 25 bp, synthetic construct
  misc_feature 1..25: note = Oligonucleotide
  source 1..25: mol_type = other DNA
acccatatgccttttccacactgct

SEQ ID NO: 37635 - DNA, 25 bp, synthetic construct
  misc_feature 1..25: note = Oligonucleotide
  source 1..25: mol_type = other DNA
cacacccatatgccttttccacact

SEQ ID NO: 37636 - DNA, 25 bp, synthetic construct
  misc_feature 1..25: note = Oligonucleotide
  source 1..25: mol_type = other DNA
tcacacacccatatgccttttccac

SEQ ID NO: 37637 - DNA, 25 bp, synthetic construct
  misc_feature 1..25: note = Oligonucleotide
  source 1..25: mol_type = other DNA
aggtcacacacccatatgccttttc

SEQ ID NO: 37638 - DNA, 25 bp, synthetic construct
  misc_feature 1..25: note = Oligonucleotide
  source 1..25: mol_type = other DNA
accaggtcacacacccatatgcctt

SEQ ID NO: 37639 - DNA, 25 bp, synthetic construct
  misc_feature 1..25: note = Oligonucleotide
  source 1..25: mol_type = other DNA
gggaccaggtcacacacccatatgc

SEQ ID NO: 37640 - DNA, 25 bp, synthetic construct
  misc_feature 1..25: note = Oligonucleotide
  source 1..25: mol_type = other DNA
tgagggaccaggtcacacacccata

SEQ ID NO: 37641 - DNA, 25 bp, synthetic construct
  misc_feature 1..25: note = Oligonucleotide
  source 1..25: mol_type = other DNA
ctctgagggaccaggtcacacaccc

SEQ ID NO: 37642 - DNA, 25 bp, synthetic construct
  misc_feature 1..25: note = Oligonucleotide
  source 1..25: mol_type = other DNA
agtctctgagggaccaggtcacaca

SEQ ID NO: 37643 - DNA, 25 bp, synthetic construct
  misc_feature 1..25: note = Oligonucleotide
  source 1..25: mol_type = other DNA
ggcagtctctgagggaccaggtcac

SEQ ID NO: 37644 - DNA, 25 bp, synthetic construct
  misc_feature 1..25: note = Oligonucleotide
  source 1..25: mol_type = other DNA
cttggcagtctctgagggaccaggt

SEQ ID NO: 37645 - DNA, 25 bp, synthetic construct
  misc_feature 1..25: note = Oligonucleotide
  source 1..25: mol_type = other DNA
actcttggcagtctctgagggacca

SEQ ID NO: 37646 - DNA, 25 bp, synthetic construct
  misc_feature 1..25: note = Oligonucleotide
  source 1..25: mol_type = other DNA
ataactcttggcagtctctgaggga

SEQ ID NO: 37647 - DNA, 25 bp, synthetic construct
  misc_feature 1..25: note = Oligonucleotide
  source 1..25: mol_type = other DNA
gaaataactcttggcagtctctgag

SEQ ID NO: 37648 - DNA, 25 bp, synthetic construct
  misc_feature 1..25: note = Oligonucleotide
  source 1..25: mol_type = other DNA
acagaaataactcttggcagtctct

SEQ ID NO: 37649 - DNA, 25 bp, synthetic construct
  misc_feature 1..25: note = Oligonucleotide
  source 1..25: mol_type = other DNA
cctacagaaataactcttggcagtc

SEQ ID NO: 37650 - DNA, 25 bp, synthetic construct
  misc_feature 1..25: note = Oligonucleotide
  source 1..25: mol_type = other DNA
ccacctacagaaataactcttggca

SEQ ID NO: 37651 - DNA, 25 bp, synthetic construct
  misc_feature 1..25: note = Oligonucleotide
  source 1..25: mol_type = other DNA
atcccacctacagaaataactcttg

SEQ ID NO: 37652 - DNA, 25 bp, synthetic construct
  misc_feature 1..25: note = Oligonucleotide
  source 1..25: mol_type = other DNA
acaatcccacctacagaaataactc

SEQ ID NO: 37653 - DNA, 25 bp, synthetic construct
  misc_feature 1..25: note = Oligonucleotide
  source 1..25: mol_type = other DNA
cccacaatcccacctacagaaataa

SEQ ID NO: 37654 - DNA, 25 bp, synthetic construct
  misc_feature 1..25: note = Oligonucleotide
  source 1..25: mol_type = other DNA
ttccccacaatcccacctacagaaa

SEQ ID NO: 37655 - DNA, 25 bp, synthetic construct
  misc_feature 1..25: note = Oligonucleotide
  source 1..25: mol_type = other DNA
ttcttccccacaatcccacctacag

SEQ ID NO: 37656 - DNA, 25 bp, synthetic construct
  misc_feature 1..25: note = Oligonucleotide
  source 1..25: mol_type = other DNA
gccttcttccccacaatcccaccta

SEQ ID NO: 37657 - DNA, 25 bp, synthetic construct
  misc_feature 1..25: note = Oligonucleotide
  source 1..25: mol_type = other DNA
ccagccttcttccccacaatcccac

SEQ ID NO: 37658 - DNA, 25 bp, synthetic construct
  misc_feature 1..25: note = Oligonucleotide
  source 1..25: mol_type = other DNA
tcaccagccttcttccccacaatcc

SEQ ID NO: 37659 - DNA, 25 bp, synthetic construct
  misc_feature 1..25: note = Oligonucleotide
  source 1..25: mol_type = other DNA
gcctcaccagccttcttccccacaa

SEQ ID NO: 37660 - DNA, 25 bp, synthetic construct
  misc_feature 1..25: note = Oligonucleotide
  source 1..25: mol_type = other DNA
gcagcctcaccagccttcttcccca

SEQ ID NO: 37661 - DNA, 25 bp, synthetic construct
  misc_feature 1..25: note = Oligonucleotide
  source 1..25: mol_type = other DNA
gctgcagcctcaccagccttcttcc

SEQ ID NO: 37662 - DNA, 25 bp, synthetic construct
  misc_feature 1..25: note = Oligonucleotide
  source 1..25: mol_type = other DNA
gtagctgcagcctcaccagccttct

SEQ ID NO: 37663 - DNA, 25 bp, synthetic construct
  misc_feature 1..25: note = Oligonucleotide
  source 1..25: mol_type = other DNA
aaagtagctgcagcctcaccagcct

SEQ ID NO: 37664 - DNA, 25 bp, synthetic construct
  misc_feature 1..25: note = Oligonucleotide
  source 1..25: mol_type = other DNA
tccaaagtagctgcagcctcaccag

SEQ ID NO: 37665 - DNA, 25 bp, synthetic construct
  misc_feature 1..25: note = Oligonucleotide
  source 1..25: mol_type = other DNA
agctccaaagtagctgcagcctcac

SEQ ID NO: 37666 - DNA, 25 bp, synthetic construct
  misc_feature 1..25: note = Oligonucleotide
  source 1..25: mol_type = other DNA
ctcagctccaaagtagctgcagcct

SEQ ID NO: 37667 - DNA, 25 bp, synthetic construct
  misc_feature 1..25: note = Oligonucleotide
  source 1..25: mol_type = other DNA
cttctcagctccaaagtagctgcag

SEQ ID NO: 37668 - DNA, 25 bp, synthetic construct
  misc_feature 1..25: note = Oligonucleotide
  source 1..25: mol_type = other DNA
gcgcttctcagctccaaagtagctg

SEQ ID NO: 37669 - DNA, 25 bp, synthetic construct
  misc_feature 1..25: note = Oligonucleotide
  source 1..25: mol_type = other DNA
agagcgcttctcagctccaaagtag

SEQ ID NO: 37670 - DNA, 25 bp, synthetic construct
  misc_feature 1..25: note = Oligonucleotide
  source 1..25: mol_type = other DNA
gggagagcgcttctcagctccaaag

SEQ ID NO: 37671 - DNA, 25 bp, synthetic construct
  misc_feature 1..25: note = Oligonucleotide
  source 1..25: mol_type = other DNA
caggggagagcgcttctcagctcca

SEQ ID NO: 37672 - DNA, 25 bp, synthetic construct
  misc_feature 1..25: note = Oligonucleotide
  source 1..25: mol_type = other DNA
gagcaggggagagcgcttctcagct

SEQ ID NO: 37673 - DNA, 25 bp, synthetic construct
  misc_feature 1..25: note = Oligonucleotide
  source 1..25: mol_type = other DNA
ggagagcaggggagagcgcttctca

SEQ ID NO: 37674 - DNA, 25 bp, synthetic construct
  misc_feature 1..25: note = Oligonucleotide
  source 1..25: mol_type = other DNA
cagggagagcaggggagagcgcttc

SEQ ID NO: 37675 - DNA, 25 bp, synthetic construct
  misc_feature 1..25: note = Oligonucleotide
  source 1..25: mol_type = other DNA
ggccagggagagcaggggagagcgc

SEQ ID NO: 37676 - DNA, 25 bp, synthetic construct
  misc_feature 1..25: note = Oligonucleotide
  source 1..25: mol_type = other DNA
ttaggccagggagagcaggggagag

SEQ ID NO: 37677 - DNA, 25 bp, synthetic construct
  misc_feature 1..25: note = Oligonucleotide
  source 1..25: mol_type = other DNA
tgtttaggccagggagagcagggga

SEQ ID NO: 37678 - DNA, 25 bp, synthetic construct
  misc_feature 1..25: note = Oligonucleotide
  source 1..25: mol_type = other DNA
cagtgtttaggccagggagagcagg

SEQ ID NO: 37679 - DNA, 25 bp, synthetic construct
  misc_feature 1..25: note = Oligonucleotide
  source 1..25: mol_type = other DNA
actcagtgtttaggccagggagagc

SEQ ID NO: 37680 - DNA, 25 bp, synthetic construct
  misc_feature 1..25: note = Oligonucleotide
  source 1..25: mol_type = other DNA
gacactcagtgtttaggccagggag

SEQ ID NO: 37681 - DNA, 25 bp, synthetic construct
  misc_feature 1..25: note = Oligonucleotide
  source 1..25: mol_type = other DNA
gaagacactcagtgtttaggccagg

SEQ ID NO: 37682 - DNA, 25 bp, synthetic construct
  misc_feature 1..25: note = Oligonucleotide
  source 1..25: mol_type = other DNA
atggaagacactcagtgtttaggcc

SEQ ID NO: 37683 - DNA, 25 bp, synthetic construct
  misc_feature 1..25: note = Oligonucleotide
  source 1..25: mol_type = other DNA
accatggaagacactcagtgtttag

SEQ ID NO: 37684 - DNA, 25 bp, synthetic construct
  misc_feature 1..25: note = Oligonucleotide
  source 1..25: mol_type = other DNA
gaaaccatggaagacactcagtgtt

SEQ ID NO: 37685 - DNA, 25 bp, synthetic construct
  misc_feature 1..25: note = Oligonucleotide
  source 1..25: mol_type = other DNA
aaagaaaccatggaagacactcagt

SEQ ID NO: 37686 - DNA, 25 bp, synthetic construct
  misc_feature 1..25: note = Oligonucleotide
  source 1..25: mol_type = other DNA
aagaaagaaaccatggaagacactc

SEQ ID NO: 37687 - DNA, 25 bp, synthetic construct
  misc_feature 1..25: note = Oligonucleotide
  source 1..25: mol_type = other DNA
gataagaaagaaaccatggaagaca

SEQ ID NO: 37688 - DNA, 25 bp, synthetic construct
  misc_feature 1..25: note = Oligonucleotide
  source 1..25: mol_type = other DNA
gaggataagaaagaaaccatggaag

SEQ ID NO: 37689 - DNA, 25 bp, synthetic construct
  misc_feature 1..25: note = Oligonucleotide
  source 1..25: mol_type = other DNA
gcagaggataagaaagaaaccatgg

SEQ ID NO: 37690 - DNA, 25 bp, synthetic construct
  misc_feature 1..25: note = Oligonucleotide
  source 1..25: mol_type = other DNA
gaggcagaggataagaaagaaacca

SEQ ID NO: 37691 - DNA, 25 bp, synthetic construct
  misc_feature 1..25: note = Oligonucleotide
  source 1..25: mol_type = other DNA
ggtgaggcagaggataagaaagaaa

SEQ ID NO: 37692 - DNA, 25 bp, synthetic construct
  misc_feature 1..25: note = Oligonucleotide
  source 1..25: mol_type = other DNA
tcaggtgaggcagaggataagaaag

SEQ ID NO: 37693 - DNA, 25 bp, synthetic construct
  misc_feature 1..25: note = Oligonucleotide
  source 1..25: mol_type = other DNA
acatcaggtgaggcagaggataaga

SEQ ID NO: 37694 - DNA, 25 bp, synthetic construct
  misc_feature 1..25: note = Oligonucleotide
  source 1..25: mol_type = other DNA
gacacatcaggtgaggcagaggata

SEQ ID NO: 37695 - DNA, 25 bp, synthetic construct
  misc_feature 1..25: note = Oligonucleotide
  source 1..25: mol_type = other DNA
cccgacacatcaggtgaggcagagg

SEQ ID NO: 37696 - DNA, 25 bp, synthetic construct
  misc_feature 1..25: note = Oligonucleotide
  source 1..25: mol_type = other DNA
caccccgacacatcaggtgaggcag

SEQ ID NO: 37697 - DNA, 25 bp, synthetic construct
  misc_feature 1..25: note = Oligonucleotide
  source 1..25: mol_type = other DNA
acccaccccgacacatcaggtgagg

SEQ ID NO: 37698 - DNA, 25 bp, synthetic construct
  misc_feature 1..25: note = Oligonucleotide
  source 1..25: mol_type = other DNA
gccacccaccccgacacatcaggtg

SEQ ID NO: 37699 - DNA, 25 bp, synthetic construct
  misc_feature 1..25: note = Oligonucleotide
  source 1..25: mol_type = other DNA
gaggccacccaccccgacacatcag

SEQ ID NO: 37700 - DNA, 25 bp, synthetic construct
  misc_feature 1..25: note = Oligonucleotide
  source 1..25: mol_type = other DNA
tgtgaggccacccaccccgacacat

SEQ ID NO: 37701 - DNA, 25 bp, synthetic construct
  misc_feature 1..25: note = Oligonucleotide
  source 1..25: mol_type = other DNA
ggctgtgaggccacccaccccgaca

SEQ ID NO: 37702 - DNA, 25 bp, synthetic construct
  misc_feature 1..25: note = Oligonucleotide
  source 1..25: mol_type = other DNA
cagggctgtgaggccacccaccccg

SEQ ID NO: 37703 - DNA, 25 bp, synthetic construct
  misc_feature 1..25: note = Oligonucleotide
  source 1..25: mol_type = other DNA
gggcagggctgtgaggccacccacc

SEQ ID NO: 37704 - DNA, 25 bp, synthetic construct
  misc_feature 1..25: note = Oligonucleotide
  source 1..25: mol_type = other DNA
gcagggcagggctgtgaggccaccc

SEQ ID NO: 37705 - DNA, 25 bp, synthetic construct
  misc_feature 1..25: note = Oligonucleotide
  source 1..25: mol_type = other DNA
tgtgcagggcagggctgtgaggcca

SEQ ID NO: 37706 - DNA, 25 bp, synthetic construct
  misc_feature 1..25: note = Oligonucleotide
  source 1..25: mol_type = other DNA
acctgtgcagggcagggctgtgagg

SEQ ID NO: 37707 - DNA, 25 bp, synthetic construct
  misc_feature 1..25: note = Oligonucleotide
  source 1..25: mol_type = other DNA
gagacctgtgcagggcagggctgtg

SEQ ID NO: 37708 - DNA, 25 bp, synthetic construct
  misc_feature 1..25: note = Oligonucleotide
  source 1..25: mol_type = other DNA
gatgagacctgtgcagggcagggct

SEQ ID NO: 37709 - DNA, 25 bp, synthetic construct
  misc_feature 1..25: note = Oligonucleotide
  source 1..25: mol_type = other DNA
ggtgatgagacctgtgcagggcagg

SEQ ID NO: 37710 - DNA, 25 bp, synthetic construct
  misc_feature 1..25: note = Oligonucleotide
  source 1..25: mol_type = other DNA
caaggtgatgagacctgtgcagggc

SEQ ID NO: 37711 - DNA, 25 bp, synthetic construct
  misc_feature 1..25: note = Oligonucleotide
  source 1..25: mol_type = other DNA
ctgcaaggtgatgagacctgtgcag

SEQ ID NO: 37712 - DNA, 25 bp, synthetic construct
  misc_feature 1..25: note = Oligonucleotide
  source 1..25: mol_type = other DNA
cagctgcaaggtgatgagacctgtg

SEQ ID NO: 37713 - DNA, 25 bp, synthetic construct
  misc_feature 1..25: note = Oligonucleotide
  source 1..25: mol_type = other DNA
gtccagctgcaaggtgatgagacct

SEQ ID NO: 37714 - DNA, 25 bp, synthetic construct
  misc_feature 1..25: note = Oligonucleotide
  source 1..25: mol_type = other DNA
atggtccagctgcaaggtgatgaga

SEQ ID NO: 37715 - DNA, 25 bp, synthetic construct
  misc_feature 1..25: note = Oligonucleotide
  source 1..25: mol_type = other DNA
gccatggtccagctgcaaggtgatg

SEQ ID NO: 37716 - DNA, 25 bp, synthetic construct
  misc_feature 1..25: note = Oligonucleotide
  source 1..25: mol_type = other DNA
aaagccatggtccagctgcaaggtg

SEQ ID NO: 37717 - DNA, 25 bp, synthetic construct
  misc_feature 1..25: note = Oligonucleotide
  source 1..25: mol_type = other DNA
aacaaagccatggtccagctgcaag

SEQ ID NO: 37718 - DNA, 25 bp, synthetic construct
  misc_feature 1..25: note = Oligonucleotide
  source 1..25: mol_type = other DNA
gagaacaaagccatggtccagctgc

SEQ ID NO: 37719 - DNA, 25 bp, synthetic construct
  misc_feature 1..25: note = Oligonucleotide
  source 1..25: mol_type = other DNA
catgagaacaaagccatggtccagc

SEQ ID NO: 37720 - DNA, 25 bp, synthetic construct
  misc_feature 1..25: note = Oligonucleotide
  source 1..25: mol_type = other DNA
agtcatgagaacaaagccatggtcc

SEQ ID NO: 37721 - DNA, 25 bp, synthetic construct
  misc_feature 1..25: note = Oligonucleotide
  source 1..25: mol_type = other DNA
ggcagtcatgagaacaaagccatgg

SEQ ID NO: 37722 - DNA, 25 bp, synthetic construct
  misc_feature 1..25: note = Oligonucleotide
  source 1..25: mol_type = other DNA
gcaggcagtcatgagaacaaagcca

SEQ ID NO: 37723 - DNA, 25 bp, synthetic construct
  misc_feature 1..25: note = Oligonucleotide
  source 1..25: mol_type = other DNA
agggcaggcagtcatgagaacaaag

SEQ ID NO: 37724 - DNA, 25 bp, synthetic construct
  misc_feature 1..25: note = Oligonucleotide
  source 1..25: mol_type = other DNA
gccagggcaggcagtcatgagaaca

SEQ ID NO: 37725 - DNA, 25 bp, synthetic construct
  misc_feature 1..25: note = Oligonucleotide
  source 1..25: mol_type = other DNA
agagccagggcaggcagtcatgaga

SEQ ID NO: 37726 - DNA, 25 bp, synthetic construct
  misc_feature 1..25: note = Oligonucleotide
  source 1..25: mol_type = other DNA
ggcagagccagggcaggcagtcatg

SEQ ID NO: 37727 - DNA, 25 bp, synthetic construct
  misc_feature 1..25: note = Oligonucleotide
  source 1..25: mol_type = other DNA
gagggcagagccagggcaggcagtc

SEQ ID NO: 37728 - DNA, 25 bp, synthetic construct
  misc_feature 1..25: note = Oligonucleotide
  source 1..25: mol_type = other DNA
ccagagggcagagccagggcaggca

SEQ ID NO: 37729 - DNA, 25 bp, synthetic construct
  misc_feature 1..25: note = Oligonucleotide
  source 1..25: mol_type = other DNA
ggaccagagggcagagccagggcag

SEQ ID NO: 37730 - DNA, 25 bp, synthetic construct
  misc_feature 1..25: note = Oligonucleotide
  source 1..25: mol_type = other DNA
gatggaccagagggcagagccaggg

SEQ ID NO: 37731 - DNA, 25 bp, synthetic construct
  misc_feature 1..25: note = Oligonucleotide
  source 1..25: mol_type = other DNA
agggatggaccagagggcagagcca

SEQ ID NO: 37732 - DNA, 25 bp, synthetic construct
  misc_feature 1..25: note = Oligonucleotide
  source 1..25: mol_type = other DNA
cagagggatggaccagagggcagag

SEQ ID NO: 37733 - DNA, 25 bp, synthetic construct
  misc_feature 1..25: note = Oligonucleotide
  source 1..25: mol_type = other DNA
ggccagagggatggaccagagggca

SEQ ID NO: 37734 - DNA, 25 bp, synthetic construct
  misc_feature 1..25: note = Oligonucleotide
  source 1..25: mol_type = other DNA
tttggccagagggatggaccagagg

SEQ ID NO: 37735 - DNA, 25 bp, synthetic construct
  misc_feature 1..25: note = Oligonucleotide
  source 1..25: mol_type = other DNA
tgatttggccagagggatggaccag

SEQ ID NO: 37736 - DNA, 25 bp, synthetic construct
  misc_feature 1..25: note = Oligonucleotide
  source 1..25: mol_type = other DNA
gcctgatttggccagagggatggac

SEQ ID NO: 37737 - DNA, 25 bp, synthetic construct
  misc_feature 1..25: note = Oligonucleotide
  source 1..25: mol_type = other DNA
aaagcctgatttggccagagggatg

SEQ ID NO: 37738 - DNA, 25 bp, synthetic construct
  misc_feature 1..25: note = Oligonucleotide
  source 1..25: mol_type = other DNA
cggaaagcctgatttggccagaggg

SEQ ID NO: 37739 - DNA, 25 bp, synthetic construct
  misc_feature 1..25: note = Oligonucleotide
  source 1..25: mol_type = other DNA
ctgcggaaagcctgatttggccaga

SEQ ID NO: 37740 - DNA, 25 bp, synthetic construct
  misc_feature 1..25: note = Oligonucleotide
  source 1..25: mol_type = other DNA
gctctgcggaaagcctgatttggcc

SEQ ID NO: 37741 - DNA, 25 bp, synthetic construct
  misc_feature 1..25: note = Oligonucleotide
  source 1..25: mol_type = other DNA
gcagctctgcggaaagcctgatttg

SEQ ID NO: 37742 - DNA, 25 bp, synthetic construct
  misc_feature 1..25: note = Oligonucleotide
  source 1..25: mol_type = other DNA
atagcagctctgcggaaagcctgat

SEQ ID NO: 37743 - DNA, 25 bp, synthetic construct
  misc_feature 1..25: note = Oligonucleotide
  source 1..25: mol_type = other DNA
gtgatagcagctctgcggaaagcct

SEQ ID NO: 37744 - DNA, 25 bp, synthetic construct
  misc_feature 1..25: note = Oligonucleotide
  source 1..25: mol_type = other DNA
ggggtgatagcagctctgcggaaag

SEQ ID NO: 37745 - DNA, 25 bp, synthetic construct
  misc_feature 1..25: note = Oligonucleotide
  source 1..25: mol_type = other DNA
tatggggtgatagcagctctgcgga

SEQ ID NO: 37746 - DNA, 25 bp, synthetic construct
  misc_feature 1..25: note = Oligonucleotide
  source 1..25: mol_type = other DNA
ggatatggggtgatagcagctctgc

SEQ ID NO: 37747 - DNA, 25 bp, synthetic construct
  misc_feature 1..25: note = Oligonucleotide
  source 1..25: mol_type = other DNA
gacggatatggggtgatagcagctc

SEQ ID NO: 37748 - DNA, 25 bp, synthetic construct
  misc_feature 1..25: note = Oligonucleotide
  source 1..25: mol_type = other DNA
ctggacggatatggggtgatagcag

SEQ ID NO: 37749 - DNA, 25 bp, synthetic construct
  misc_feature 1..25: note = Oligonucleotide
  source 1..25: mol_type = other DNA
aagctggacggatatggggtgatag

SEQ ID NO: 37750 - DNA, 25 bp, synthetic construct
  misc_feature 1..25: note = Oligonucleotide
  source 1..25: mol_type = other DNA
gtcaagctggacggatatggggtga

SEQ ID NO: 37751 - DNA, 25 bp, synthetic construct
  misc_feature 1..25: note = Oligonucleotide
  source 1..25: mol_type = other DNA
agggtcaagctggacggatatgggg

SEQ ID NO: 37752 - DNA, 25 bp, synthetic construct
  misc_feature 1..25: note = Oligonucleotide
  source 1..25: mol_type = other DNA
cagagggtcaagctggacggatatg

SEQ ID NO: 37753 - DNA, 25 bp, synthetic construct
  misc_feature 1..25: note = Oligonucleotide
  source 1..25: mol_type = other DNA
gcacagagggtcaagctggacggat

SEQ ID NO: 37754 - DNA, 25 bp, synthetic construct
  misc_feature 1..25: note = Oligonucleotide
  source 1..25: mol_type = other DNA
agtgcacagagggtcaagctggacg

SEQ ID NO: 37755 - DNA, 25 bp, synthetic construct
  misc_feature 1..25: note = Oligonucleotide
  source 1..25: mol_type = other DNA
aggagtgcacagagggtcaagctgg

SEQ ID NO: 37756 - DNA, 25 bp, synthetic construct
  misc_feature 1..25: note = Oligonucleotide
  source 1..25: mol_type = other DNA
atgaggagtgcacagagggtcaagc

SEQ ID NO: 37757 - DNA, 25 bp, synthetic construct
  misc_feature 1..25: note = Oligonucleotide
  source 1..25: mol_type = other DNA
gcaatgaggagtgcacagagggtca

SEQ ID NO: 37758 - DNA, 25 bp, synthetic construct
  misc_feature 1..25: note = Oligonucleotide
  source 1..25: mol_type = other DNA
gaggcaatgaggagtgcacagaggg

SEQ ID NO: 37759 - DNA, 25 bp, synthetic construct
  misc_feature 1..25: note = Oligonucleotide
  source 1..25: mol_type = other DNA
cctgaggcaatgaggagtgcacaga

SEQ ID NO: 37760 - DNA, 25 bp, synthetic construct
  misc_feature 1..25: note = Oligonucleotide
  source 1..25: mol_type = other DNA
ggccctgaggcaatgaggagtgcac

SEQ ID NO: 37761 - DNA, 25 bp, synthetic construct
  misc_feature 1..25: note = Oligonucleotide
  source 1..25: mol_type = other DNA
cagggccctgaggcaatgaggagtg

SEQ ID NO: 37762 - DNA, 25 bp, synthetic construct
  misc_feature 1..25: note = Oligonucleotide
  source 1..25: mol_type = other DNA
ctccagggccctgaggcaatgagga

SEQ ID NO: 37763 - DNA, 25 bp, synthetic construct
  misc_feature 1..25: note = Oligonucleotide
  source 1..25: mol_type = other DNA
gatctccagggccctgaggcaatga

SEQ ID NO: 37764 - DNA, 25 bp, synthetic construct
  misc_feature 1..25: note = Oligonucleotide
  source 1..25: mol_type = other DNA
gccgatctccagggccctgaggcaa

SEQ ID NO: 37765 - DNA, 25 bp, synthetic construct
  misc_feature 1..25: note = Oligonucleotide
  source 1..25: mol_type = other DNA
ggggccgatctccagggccctgagg

SEQ ID NO: 37766 - DNA, 25 bp, synthetic construct
  misc_feature 1..25: note = Oligonucleotide
  source 1..25: mol_type = other DNA
actggggccgatctccagggccctg

SEQ ID NO: 37767 - DNA, 25 bp, synthetic construct
  misc_feature 1..25: note = Oligonucleotide
  source 1..25: mol_type = other DNA
agcactggggccgatctccagggcc

SEQ ID NO: 37768 - DNA, 25 bp, synthetic construct
  misc_feature 1..25: note = Oligonucleotide
  source 1..25: mol_type = other DNA
gagagcactggggccgatctccagg

SEQ ID NO: 37769 - DNA, 25 bp, synthetic construct
  misc_feature 1..25: note = Oligonucleotide
  source 1..25: mol_type = other DNA
caggagagcactggggccgatctcc

SEQ ID NO: 37770 - DNA, 25 bp, synthetic construct
  misc_feature 1..25: note = Oligonucleotide
  source 1..25: mol_type = other DNA
aagcaggagagcactggggccgatc

SEQ ID NO: 37771 - DNA, 25 bp, synthetic construct
  misc_feature 1..25: note = Oligonucleotide
  source 1..25: mol_type = other DNA
atgaagcaggagagcactggggccg

SEQ ID NO: 37772 - DNA, 25 bp, synthetic construct
  misc_feature 1..25: note = Oligonucleotide
  source 1..25: mol_type = other DNA
cagatgaagcaggagagcactgggg

SEQ ID NO: 37773 - DNA, 25 bp, synthetic construct
  misc_feature 1..25: note = Oligonucleotide
  source 1..25: mol_type = other DNA
ttccagatgaagcaggagagcactg

SEQ ID NO: 37774 - DNA, 25 bp, synthetic construct
  misc_feature 1..25: note = Oligonucleotide
  source 1..25: mol_type = other DNA
tgtttccagatgaagcaggagagca

SEQ ID NO: 37775 - DNA, 25 bp, synthetic construct
  misc_feature 1..25: note = Oligonucleotide
  source 1..25: mol_type = other DNA
aaatgtttccagatgaagcaggaga

SEQ ID NO: 37776 - DNA, 25 bp, synthetic construct
  misc_feature 1..25: note = Oligonucleotide
  source 1..25: mol_type = other DNA
gacaaatgtttccagatgaagcagg

SEQ ID NO: 37777 - DNA, 25 bp, synthetic construct
  misc_feature 1..25: note = Oligonucleotide
  source 1..25: mol_type = other DNA
agagacaaatgtttccagatgaagc

SEQ ID NO: 37778 - DNA, 25 bp, synthetic construct
  misc_feature 1..25: note = Oligonucleotide
  source 1..25: mol_type = other DNA
ggcagagacaaatgtttccagatga

SEQ ID NO: 37779 - DNA, 25 bp, synthetic construct
  misc_feature 1..25: note = Oligonucleotide
  source 1..25: mol_type = other DNA
ggaggcagagacaaatgtttccaga

SEQ ID NO: 37780 - DNA, 25 bp, synthetic construct
  misc_feature 1..25: note = Oligonucleotide
  source 1..25: mol_type = other DNA
aagggaggcagagacaaatgtttcc

SEQ ID NO: 37781 - DNA, 25 bp, synthetic construct
  misc_feature 1..25: note = Oligonucleotide
  source 1..25: mol_type = other DNA
gtcaagggaggcagagacaaatgtt

SEQ ID NO: 37782 - DNA, 25 bp, synthetic construct
  misc_feature 1..25: note = Oligonucleotide
  source 1..25: mol_type = other DNA
caggtcaagggaggcagagacaaat

SEQ ID NO: 37783 - DNA, 25 bp, synthetic construct
  misc_feature 1..25: note = Oligonucleotide
  source 1..25: mol_type = other DNA
acccaggtcaagggaggcagagaca

SEQ ID NO: 37784 - DNA, 25 bp, synthetic construct
  misc_feature 1..25: note = Oligonucleotide
  source 1..25: mol_type = other DNA
aagacccaggtcaagggaggcagag

SEQ ID NO: 37785 - DNA, 25 bp, synthetic construct
  misc_feature 1..25: note = Oligonucleotide
  source 1..25: mol_type = other DNA
cagaagacccaggtcaagggaggca

SEQ ID NO: 37786 - DNA, 25 bp, synthetic construct
  misc_feature 1..25: note = Oligonucleotide
  source 1..25: mol_type = other DNA
agtcagaagacccaggtcaagggag

SEQ ID NO: 37787 - DNA, 25 bp, synthetic construct
  misc_feature 1..25: note = Oligonucleotide
  source 1..25: mol_type = other DNA
aagagtcagaagacccaggtcaagg

SEQ ID NO: 37788 - DNA, 25 bp, synthetic construct
  misc_feature 1..25: note = Oligonucleotide
  source 1..25: mol_type = other DNA
agcaagagtcagaagacccaggtca

SEQ ID NO: 37789 - DNA, 25 bp, synthetic construct
  misc_feature 1..25: note = Oligonucleotide
  source 1..25: mol_type = other DNA
aacagcaagagtcagaagacccagg

SEQ ID NO: 37790 - DNA, 25 bp, synthetic construct
  misc_feature 1..25: note = Oligonucleotide
  source 1..25: mol_type = other DNA
aggaacagcaagagtcagaagaccc

SEQ ID NO: 37791 - DNA, 25 bp, synthetic construct
  misc_feature 1..25: note = Oligonucleotide
  source 1..25: mol_type = other DNA
cccaggaacagcaagagtcagaaga

SEQ ID NO: 37792 - DNA, 25 bp, synthetic construct
  misc_feature 1..25: note = Oligonucleotide
  source 1..25: mol_type = other DNA
gggcccaggaacagcaagagtcaga

SEQ ID NO: 37793 - DNA, 25 bp, synthetic construct
  misc_feature 1..25: note = Oligonucleotide
  source 1..25: mol_type = other DNA
gtcgggcccaggaacagcaagagtc

SEQ ID NO: 37794 - DNA, 25 bp, synthetic construct
  misc_feature 1..25: note = Oligonucleotide
  source 1..25: mol_type = other DNA
agggtcgggcccaggaacagcaaga

SEQ ID NO: 37795 - DNA, 25 bp, synthetic construct
  misc_feature 1..25: note = Oligonucleotide
  source 1..25: mol_type = other DNA
tgcagggtcgggcccaggaacagca

SEQ ID NO: 37796 - DNA, 25 bp, synthetic construct
  misc_feature 1..25: note = Oligonucleotide
  source 1..25: mol_type = other DNA
acctgcagggtcgggcccaggaaca

SEQ ID NO: 37797 - DNA, 25 bp, synthetic construct
  misc_feature 1..25: note = Oligonucleotide
  source 1..25: mol_type = other DNA
tagacctgcagggtcgggcccagga

SEQ ID NO: 37798 - DNA, 25 bp, synthetic construct
  misc_feature 1..25: note = Oligonucleotide
  source 1..25: mol_type = other DNA
acctagacctgcagggtcgggccca

SEQ ID NO: 37799 - DNA, 25 bp, synthetic construct
  misc_feature 1..25: note = Oligonucleotide
  source 1..25: mol_type = other DNA
tggacctagacctgcagggtcgggc

SEQ ID NO: 37800 - DNA, 25 bp, synthetic construct
  misc_feature 1..25: note = Oligonucleotide
  source 1..25: mol_type = other DNA
gcatggacctagacctgcagggtcg

SEQ ID NO: 37801 - DNA, 25 bp, synthetic construct
  misc_feature 1..25: note = Oligonucleotide
  source 1..25: mol_type = other DNA
ggtgcatggacctagacctgcaggg

SEQ ID NO: 37802 - DNA, 25 bp, synthetic construct
  misc_feature 1..25: note = Oligonucleotide
  source 1..25: mol_type = other DNA
gcaggtgcatggacctagacctgca

SEQ ID NO: 37803 - DNA, 25 bp, synthetic construct
  misc_feature 1..25: note = Oligonucleotide
  source 1..25: mol_type = other DNA
agggcaggtgcatggacctagacct

SEQ ID NO: 37804 - DNA, 25 bp, synthetic construct
  misc_feature 1..25: note = Oligonucleotide
  source 1..25: mol_type = other DNA
tgcagggcaggtgcatggacctaga

SEQ ID NO: 37805 - DNA, 25 bp, synthetic construct
  misc_feature 1..25: note = Oligonucleotide
  source 1..25: mol_type = other DNA
gcctgcagggcaggtgcatggacct

SEQ ID NO: 37806 - DNA, 25 bp, synthetic construct
  misc_feature 1..25: note = Oligonucleotide
  source 1..25: mol_type = other DNA
aaggcctgcagggcaggtgcatgga

SEQ ID NO: 37807 - DNA, 25 bp, synthetic construct
  misc_feature 1..25: note = Oligonucleotide
  source 1..25: mol_type = other DNA
ctcaaggcctgcagggcaggtgcat

SEQ ID NO: 37808 - DNA, 25 bp, synthetic construct
  misc_feature 1..25: note = Oligonucleotide
  source 1..25: mol_type = other DNA
tggctcaaggcctgcagggcaggtg

SEQ ID NO: 37809 - DNA, 25 bp, synthetic construct
  misc_feature 1..25: note = Oligonucleotide
  source 1..25: mol_type = other DNA
gagtggctcaaggcctgcagggcag

SEQ ID NO: 37810 - DNA, 25 bp, synthetic construct
  misc_feature 1..25: note = Oligonucleotide
  source 1..25: mol_type = other DNA
ggagagtggctcaaggcctgcaggg

SEQ ID NO: 37811 - DNA, 25 bp, synthetic construct
  misc_feature 1..25: note = Oligonucleotide
  source 1..25: mol_type = other DNA
ctaggagagtggctcaaggcctgca

SEQ ID NO: 37812 - DNA, 25 bp, synthetic construct
  misc_feature 1..25: note = Oligonucleotide
  source 1..25: mol_type = other DNA
gtcctaggagagtggctcaaggcct

SEQ ID NO: 37813 - DNA, 25 bp, synthetic construct
  misc_feature 1..25: note = Oligonucleotide
  source 1..25: mol_type = other DNA
gcagtcctaggagagtggctcaagg

SEQ ID NO: 37814 - DNA, 25 bp, synthetic construct
  misc_feature 1..25: note = Oligonucleotide
  source 1..25: mol_type = other DNA
ctggcagtcctaggagagtggctca

SEQ ID NO: 37815 - DNA, 25 bp, synthetic construct
  misc_feature 1..25: note = Oligonucleotide
  source 1..25: mol_type = other DNA
gaactggcagtcctaggagagtggc

SEQ ID NO: 37816 - DNA, 25 bp, synthetic construct
  misc_feature 1..25: note = Oligonucleotide
  source 1..25: mol_type = other DNA
gcagaactggcagtcctaggagagt

SEQ ID NO: 37817 - DNA, 25 bp, synthetic construct
  misc_feature 1..25: note = Oligonucleotide
  source 1..25: mol_type = other DNA
agtgcagaactggcagtcctaggag

SEQ ID NO: 37818 - DNA, 25 bp, synthetic construct
  misc_feature 1..25: note = Oligonucleotide
  source 1..25: mol_type = other DNA
accagtgcagaactggcagtcctag

SEQ ID NO: 37819 - DNA, 25 bp, synthetic construct
  misc_feature 1..25: note = Oligonucleotide
  source 1..25: mol_type = other DNA
gggaccagtgcagaactggcagtcc

SEQ ID NO: 37820 - DNA, 25 bp, synthetic construct
  misc_feature 1..25: note = Oligonucleotide
  source 1..25: mol_type = other DNA
tgagggaccagtgcagaactggcag

SEQ ID NO: 37821 - DNA, 25 bp, synthetic construct
  misc_feature 1..25: note = Oligonucleotide
  source 1..25: mol_type = other DNA
gcctgagggaccagtgcagaactgg

SEQ ID NO: 37822 - DNA, 25 bp, synthetic construct
  misc_feature 1..25: note = Oligonucleotide
  source 1..25: mol_type = other DNA
ggtgcctgagggaccagtgcagaac

SEQ ID NO: 37823 - DNA, 25 bp, synthetic construct
  misc_feature 1..25: note = Oligonucleotide
  source 1..25: mol_type = other DNA
gagggtgcctgagggaccagtgcag

SEQ ID NO: 37824 - DNA, 25 bp, synthetic construct
  misc_feature 1..25: note = Oligonucleotide
  source 1..25: mol_type = other DNA
caagagggtgcctgagggaccagtg

SEQ ID NO: 37825 - DNA, 25 bp, synthetic construct
  misc_feature 1..25: note = Oligonucleotide
  source 1..25: mol_type = other DNA
gtacaagagggtgcctgagggacca

SEQ ID NO: 37826 - DNA, 25 bp, synthetic construct
  misc_feature 1..25: note = Oligonucleotide
  source 1..25: mol_type = other DNA
cgagtacaagagggtgcctgaggga

SEQ ID NO: 37827 - DNA, 25 bp, synthetic construct
  misc_feature 1..25: note = Oligonucleotide
  source 1..25: mol_type = other DNA
aaccgagtacaagagggtgcctgag

SEQ ID NO: 37828 - DNA, 25 bp, synthetic construct
  misc_feature 1..25: note = Oligonucleotide
  source 1..25: mol_type = other DNA
atcaaccgagtacaagagggtgcct

SEQ ID NO: 37829 - DNA, 25 bp, synthetic construct
  misc_feature 1..25: note = Oligonucleotide
  source 1..25: mol_type = other DNA
tccatcaaccgagtacaagagggtg

SEQ ID NO: 37830 - DNA, 25 bp, synthetic construct
  misc_feature 1..25: note = Oligonucleotide
  source 1..25: mol_type = other DNA
ccatccatcaaccgagtacaagagg

SEQ ID NO: 37831 - DNA, 25 bp, synthetic construct
  misc_feature 1..25: note = Oligonucleotide
  source 1..25: mol_type = other DNA
cacccatccatcaaccgagtacaag

SEQ ID NO: 37832 - DNA, 25 bp, synthetic construct
  misc_feature 1..25: note = Oligonucleotide
  source 1..25: mol_type = other DNA
gtccacccatccatcaaccgagtac

SEQ ID NO: 37833 - DNA, 25 bp, synthetic construct
  misc_feature 1..25: note = Oligonucleotide
  source 1..25: mol_type = other DNA
cctgtccacccatccatcaaccgag

SEQ ID NO: 37834 - DNA, 25 bp, synthetic construct
  misc_feature 1..25: note = Oligonucleotide
  source 1..25: mol_type = other DNA
gcacctgtccacccatccatcaacc

SEQ ID NO: 37835 - DNA, 25 bp, synthetic construct
  misc_feature 1..25: note = Oligonucleotide
  source 1..25: mol_type = other DNA
ggagcacctgtccacccatccatca

SEQ ID NO: 37836 - DNA, 25 bp, synthetic construct
  misc_feature 1..25: note = Oligonucleotide
  source 1..25: mol_type = other DNA
aaaggagcacctgtccacccatcca

SEQ ID NO: 37837 - DNA, 25 bp, synthetic construct
  misc_feature 1..25: note = Oligonucleotide
  source 1..25: mol_type = other DNA
caaaaaggagcacctgtccacccat

SEQ ID NO: 37838 - DNA, 25 bp, synthetic construct
  misc_feature 1..25: note = Oligonucleotide
  source 1..25: mol_type = other DNA
agccaaaaaggagcacctgtccacc

SEQ ID NO: 37839 - DNA, 25 bp, synthetic construct
  misc_feature 1..25: note = Oligonucleotide
  source 1..25: mol_type = other DNA
aggagccaaaaaggagcacctgtcc

SEQ ID NO: 37840 - DNA, 25 bp, synthetic construct
  misc_feature 1..25: note = Oligonucleotide
  source 1..25: mol_type = other DNA
aagaggagccaaaaaggagcacctg

SEQ ID NO: 37841 - DNA, 25 bp, synthetic construct
  misc_feature 1..25: note = Oligonucleotide
  source 1..25: mol_type = other DNA
gccaagaggagccaaaaaggagcac

SEQ ID NO: 37842 - DNA, 25 bp, synthetic construct
  misc_feature 1..25: note = Oligonucleotide
  source 1..25: mol_type = other DNA
caggccaagaggagccaaaaaggag

SEQ ID NO: 37843 - DNA, 25 bp, synthetic construct
  misc_feature 1..25: note = Oligonucleotide
  source 1..25: mol_type = other DNA
cagcaggccaagaggagccaaaaag

SEQ ID NO: 37844 - DNA, 25 bp, synthetic construct
  misc_feature 1..25: note = Oligonucleotide
  source 1..25: mol_type = other DNA
gcccagcaggccaagaggagccaaa

SEQ ID NO: 37845 - DNA, 25 bp, synthetic construct
  misc_feature 1..25: note = Oligonucleotide
  source 1..25: mol_type = other DNA
gaggcccagcaggccaagaggagcc

SEQ ID NO: 37846 - DNA, 25 bp, synthetic construct
  misc_feature 1..25: note = Oligonucleotide
  source 1..25: mol_type = other DNA
gctgaggcccagcaggccaagagga

SEQ ID NO: 37847 - DNA, 25 bp, synthetic construct
  misc_feature 1..25: note = Oligonucleotide
  source 1..25: mol_type = other DNA
gcagctgaggcccagcaggccaaga

SEQ ID NO: 37848 - DNA, 25 bp, synthetic construct
  misc_feature 1..25: note = Oligonucleotide
  source 1..25: mol_type = other DNA
ctggcagctgaggcccagcaggcca

SEQ ID NO: 37849 - DNA, 25 bp, synthetic construct
  misc_feature 1..25: note = Oligonucleotide
  source 1..25: mol_type = other DNA
atgctggcagctgaggcccagcagg

SEQ ID NO: 37850 - DNA, 25 bp, synthetic construct
  misc_feature 1..25: note = Oligonucleotide
  source 1..25: mol_type = other DNA
tgcatgctggcagctgaggcccagc

SEQ ID NO: 37851 - DNA, 25 bp, synthetic construct
  misc_feature 1..25: note = Oligonucleotide
  source 1..25: mol_type = other DNA
atgtgcatgctggcagctgaggccc

SEQ ID NO: 37852 - DNA, 25 bp, synthetic construct
  misc_feature 1..25: note = Oligonucleotide
  source 1..25: mol_type = other DNA
ccaatgtgcatgctggcagctgagg

SEQ ID NO: 37853 - DNA, 25 bp, synthetic construct
  misc_feature 1..25: note = Oligonucleotide
  source 1..25: mol_type = other DNA
caaccaatgtgcatgctggcagctg

SEQ ID NO: 37854 - DNA, 25 bp, synthetic construct
  misc_feature 1..25: note = Oligonucleotide
  source 1..25: mol_type = other DNA
acccaaccaatgtgcatgctggcag

SEQ ID NO: 37855 - DNA, 25 bp, synthetic construct
  misc_feature 1..25: note = Oligonucleotide
  source 1..25: mol_type = other DNA
acaacccaaccaatgtgcatgctgg

SEQ ID NO: 37856 - DNA, 25 bp, synthetic construct
  misc_feature 1..25: note = Oligonucleotide
  source 1..25: mol_type = other DNA
ctgacaacccaaccaatgtgcatgc

SEQ ID NO: 37857 - DNA, 25 bp, synthetic construct
  misc_feature 1..25: note = Oligonucleotide
  source 1..25: mol_type = other DNA
agtctgacaacccaaccaatgtgca

SEQ ID NO: 37858 - DNA, 25 bp, synthetic construct
  misc_feature 1..25: note = Oligonucleotide
  source 1..25: mol_type = other DNA
gggagtctgacaacccaaccaatgt

SEQ ID NO: 37859 - DNA, 25 bp, synthetic construct
  misc_feature 1..25: note = Oligonucleotide
  source 1..25: mol_type = other DNA
ctggggagtctgacaacccaaccaa

SEQ ID NO: 37860 - DNA, 25 bp, synthetic construct
  misc_feature 1..25: note = Oligonucleotide
  source 1..25: mol_type = other DNA
ggcctggggagtctgacaacccaac

SEQ ID NO: 37861 - DNA, 25 bp, synthetic construct
  misc_feature 1..25: note = Oligonucleotide
  source 1..25: mol_type = other DNA
aggggcctggggagtctgacaaccc

SEQ ID NO: 37862 - DNA, 25 bp, synthetic construct
  misc_feature 1..25: note = Oligonucleotide
  source 1..25: mol_type = other DNA
ggcaggggcctggggagtctgacaa

SEQ ID NO: 37863 - DNA, 25 bp, synthetic construct
  misc_feature 1..25: note = Oligonucleotide
  source 1..25: mol_type = other DNA
tggggcaggggcctggggagtctga

SEQ ID NO: 37864 - DNA, 25 bp, synthetic construct
  misc_feature 1..25: note = Oligonucleotide
  source 1..25: mol_type = other DNA
gcatggggcaggggcctggggagtc

SEQ ID NO: 37865 - DNA, 25 bp, synthetic construct
  misc_feature 1..25: note = Oligonucleotide
  source 1..25: mol_type = other DNA
agggcatggggcaggggcctgggga

SEQ ID NO: 37866 - DNA, 25 bp, synthetic construct
  misc_feature 1..25: note = Oligonucleotide
  source 1..25: mol_type = other DNA
gccagggcatggggcaggggcctgg

SEQ ID NO: 37867 - DNA, 25 bp, synthetic construct
  misc_feature 1..25: note = Oligonucleotide
  source 1..25: mol_type = other DNA
agagccagggcatggggcaggggcc

SEQ ID NO: 37868 - DNA, 25 bp, synthetic construct
  misc_feature 1..25: note = Oligonucleotide
  source 1..25: mol_type = other DNA
aacagagccagggcatggggcaggg

SEQ ID NO: 37869 - DNA, 25 bp, synthetic construct
  misc_feature 1..25: note = Oligonucleotide
  source 1..25: mol_type = other DNA
agcaacagagccagggcatggggca

SEQ ID NO: 37870 - DNA, 25 bp, synthetic construct
  misc_feature 1..25: note = Oligonucleotide
  source 1..25: mol_type = other DNA
cagagcaacagagccagggcatggg

SEQ ID NO: 37871 - DNA, 25 bp, synthetic construct
  misc_feature 1..25: note = Oligonucleotide
  source 1..25: mol_type = other DNA
gcccagagcaacagagccagggcat

SEQ ID NO: 37872 - DNA, 25 bp, synthetic construct
  misc_feature 1..25: note = Oligonucleotide
  source 1..25: mol_type = other DNA
tgtgcccagagcaacagagccaggg

SEQ ID NO: 37873 - DNA, 25 bp, synthetic construct
  misc_feature 1..25: note = Oligonucleotide
  source 1..25: mol_type = other DNA
tcgtgtgcccagagcaacagagcca

SEQ ID NO: 37874 - DNA, 25 bp, synthetic construct
  misc_feature 1..25: note = Oligonucleotide
  source 1..25: mol_type = other DNA
gcatcgtgtgcccagagcaacagag

SEQ ID NO: 37875 - DNA, 25 bp, synthetic construct
  misc_feature 1..25: note = Oligonucleotide
  source 1..25: mol_type = other DNA
gctgcatcgtgtgcccagagcaaca

SEQ ID NO: 37876 - DNA, 25 bp, synthetic construct
  misc_feature 1..25: note = Oligonucleotide
  source 1..25: mol_type = other DNA
agggctgcatcgtgtgcccagagca

SEQ ID NO: 37877 - DNA, 25 bp, synthetic construct
  misc_feature 1..25: note = Oligonucleotide
  source 1..25: mol_type = other DNA
tcaagggctgcatcgtgtgcccaga

SEQ ID NO: 37878 - DNA, 25 bp, synthetic construct
  misc_feature 1..25: note = Oligonucleotide
  source 1..25: mol_type = other DNA
gtttcaagggctgcatcgtgtgccc

SEQ ID NO: 37879 - DNA, 25 bp, synthetic construct
  misc_feature 1..25: note = Oligonucleotide
  source 1..25: mol_type = other DNA
gatgtttcaagggctgcatcgtgtg

SEQ ID NO: 37880 - DNA, 25 bp, synthetic construct
  misc_feature 1..25: note = Oligonucleotide
  source 1..25: mol_type = other DNA
cctgatgtttcaagggctgcatcgt

SEQ ID NO: 37881 - DNA, 25 bp, synthetic construct
  misc_feature 1..25: note = Oligonucleotide
  source 1..25: mol_type = other DNA
aatcctgatgtttcaagggctgcat

SEQ ID NO: 37882 - DNA, 25 bp, synthetic construct
  misc_feature 1..25: note = Oligonucleotide
  source 1..25: mol_type = other DNA
caaaatcctgatgtttcaagggctg

SEQ ID NO: 37883 - DNA, 25 bp, synthetic construct
  misc_feature 1..25: note = Oligonucleotide
  source 1..25: mol_type = other DNA
gatcaaaatcctgatgtttcaaggg

SEQ ID NO: 37884 - DNA, 25 bp, synthetic construct
  misc_feature 1..25: note = Oligonucleotide
  source 1..25: mol_type = other DNA
atggatcaaaatcctgatgtttcaa

SEQ ID NO: 37885 - DNA, 25 bp, synthetic construct
  misc_feature 1..25: note = Oligonucleotide
  source 1..25: mol_type = other DNA
tttatggatcaaaatcctgatgttt

SEQ ID NO: 37886 - DNA, 25 bp, synthetic construct
  misc_feature 1..25: note = Oligonucleotide
  source 1..25: mol_type = other DNA
atgtttatggatcaaaatcctgatg

SEQ ID NO: 37887 - DNA, 25 bp, synthetic construct
  misc_feature 1..25: note = Oligonucleotide
  source 1..25: mol_type = other DNA
tccatgtttatggatcaaaatcctg

SEQ ID NO: 37888 - DNA, 25 bp, synthetic construct
  misc_feature 1..25: note = Oligonucleotide
  source 1..25: mol_type = other DNA
gtctccatgtttatggatcaaaatc

SEQ ID NO: 37889 - DNA, 25 bp, synthetic construct
  misc_feature 1..25: note = Oligonucleotide
  source 1..25: mol_type = other DNA
gtggtctccatgtttatggatcaaa

SEQ ID NO: 37890 - DNA, 25 bp, synthetic construct
  misc_feature 1..25: note = Oligonucleotide
  source 1..25: mol_type = other DNA
taggtggtctccatgtttatggatc

SEQ ID NO: 37891 - DNA, 25 bp, synthetic construct
  misc_feature 1..25: note = Oligonucleotide
  source 1..25: mol_type = other DNA
taataggtggtctccatgtttatgg

SEQ ID NO: 37892 - DNA, 25 bp, synthetic construct
  misc_feature 1..25: note = Oligonucleotide
  source 1..25: mol_type = other DNA
gggtaataggtggtctccatgttta

SEQ ID NO: 37893 - DNA, 25 bp, synthetic construct
  misc_feature 1..25: note = Oligonucleotide
  source 1..25: mol_type = other DNA
ggtgggtaataggtggtctccatgt

SEQ ID NO: 37894 - DNA, 25 bp, synthetic construct
  misc_feature 1..25: note = Oligonucleotide
  source 1..25: mol_type = other DNA
ggaggtgggtaataggtggtctcca

SEQ ID NO: 37895 - DNA, 25 bp, synthetic construct
  misc_feature 1..25: note = Oligonucleotide
  source 1..25: mol_type = other DNA
cttggaggtgggtaataggtggtct

SEQ ID NO: 37896 - DNA, 25 bp, synthetic construct
  misc_feature 1..25: note = Oligonucleotide
  source 1..25: mol_type = other DNA
gtccttggaggtgggtaataggtgg

SEQ ID NO: 37897 - DNA, 25 bp, synthetic construct
  misc_feature 1..25: note = Oligonucleotide
  source 1..25: mol_type = other DNA
gtggtccttggaggtgggtaatagg

SEQ ID NO: 37898 - DNA, 25 bp, synthetic construct
  misc_feature 1..25: note = Oligonucleotide
  source 1..25: mol_type = other DNA
agagtggtccttggaggtgggtaat

SEQ ID NO: 37899 - DNA, 25 bp, synthetic construct
  misc_feature 1..25: note = Oligonucleotide
  source 1..25: mol_type = other DNA
ctcagagtggtccttggaggtgggt

SEQ ID NO: 37900 - DNA, 25 bp, synthetic construct
  misc_feature 1..25: note = Oligonucleotide
  source 1..25: mol_type = other DNA
agactcagagtggtccttggaggtg

SEQ ID NO: 37901 - DNA, 25 bp, synthetic construct
  misc_feature 1..25: note = Oligonucleotide
  source 1..25: mol_type = other DNA
gggagactcagagtggtccttggag

SEQ ID NO: 37902 - DNA, 25 bp, synthetic construct
  misc_feature 1..25: note = Oligonucleotide
  source 1..25: mol_type = other DNA
cgggggagactcagagtggtccttg

SEQ ID NO: 37903 - DNA, 25 bp, synthetic construct
  misc_feature 1..25: note = Oligonucleotide
  source 1..25: mol_type = other DNA
taccgggggagactcagagtggtcc

SEQ ID NO: 37904 - DNA, 25 bp, synthetic construct
  misc_feature 1..25: note = Oligonucleotide
  source 1..25: mol_type = other DNA
atctaccgggggagactcagagtgg

SEQ ID NO: 37905 - DNA, 25 bp, synthetic construct
  misc_feature 1..25: note = Oligonucleotide
  source 1..25: mol_type = other DNA
gccatctaccgggggagactcagag

SEQ ID NO: 37906 - DNA, 25 bp, synthetic construct
  misc_feature 1..25: note = Oligonucleotide
  source 1..25: mol_type = other DNA
agtgccatctaccgggggagactca

SEQ ID NO: 37907 - DNA, 25 bp, synthetic construct
  misc_feature 1..25: note = Oligonucleotide
  source 1..25: mol_type = other DNA
gtgagtgccatctaccgggggagac

SEQ ID NO: 37908 - DNA, 25 bp, synthetic construct
  misc_feature 1..25: note = Oligonucleotide
  source 1..25: mol_type = other DNA
tctgtgagtgccatctaccggggga

SEQ ID NO: 37909 - DNA, 25 bp, synthetic construct
  misc_feature 1..25: note = Oligonucleotide
  source 1..25: mol_type = other DNA
cggtctgtgagtgccatctaccggg

SEQ ID NO: 37910 - DNA, 25 bp, synthetic construct
  misc_feature 1..25: note = Oligonucleotide
  source 1..25: mol_type = other DNA
acgcggtctgtgagtgccatctacc

SEQ ID NO: 37911 - DNA, 25 bp, synthetic construct
  misc_feature 1..25: note = Oligonucleotide
  source 1..25: mol_type = other DNA
gccacgcggtctgtgagtgccatct

SEQ ID NO: 37912 - DNA, 25 bp, synthetic construct
  misc_feature 1..25: note = Oligonucleotide
  source 1..25: mol_type = other DNA
catgccacgcggtctgtgagtgcca

SEQ ID NO: 37913 - DNA, 25 bp, synthetic construct
  misc_feature 1..25: note = Oligonucleotide
  source 1..25: mol_type = other DNA
cagcatgccacgcggtctgtgagtg

SEQ ID NO: 37914 - DNA, 25 bp, synthetic construct
  misc_feature 1..25: note = Oligonucleotide
  source 1..25: mol_type = other DNA
tcccagcatgccacgcggtctgtga

SEQ ID NO: 37915 - DNA, 25 bp, synthetic construct
  misc_feature 1..25: note = Oligonucleotide
  source 1..25: mol_type = other DNA
cactcccagcatgccacgcggtctg

SEQ ID NO: 37916 - DNA, 25 bp, synthetic construct
  misc_feature 1..25: note = Oligonucleotide
  source 1..25: mol_type = other DNA
gagcactcccagcatgccacgcggt

SEQ ID NO: 37917 - DNA, 25 bp, synthetic construct
  misc_feature 1..25: note = Oligonucleotide
  source 1..25: mol_type = other DNA
gctgagcactcccagcatgccacgc

SEQ ID NO: 37918 - DNA, 25 bp, synthetic construct
  misc_feature 1..25: note = Oligonucleotide
  source 1..25: mol_type = other DNA
gctgctgagcactcccagcatgcca

SEQ ID NO: 37919 - DNA, 25 bp, synthetic construct
  misc_feature 1..25: note = Oligonucleotide
  source 1..25: mol_type = other DNA
gcagctgctgagcactcccagcatg

SEQ ID NO: 37920 - DNA, 25 bp, synthetic construct
  misc_feature 1..25: note = Oligonucleotide
  source 1..25: mol_type = other DNA
ctggcagctgctgagcactcccagc

SEQ ID NO: 37921 - DNA, 25 bp, synthetic construct
  misc_feature 1..25: note = Oligonucleotide
  source 1..25: mol_type = other DNA
acactggcagctgctgagcactccc

SEQ ID NO: 37922 - DNA, 25 bp, synthetic construct
  misc_feature 1..25: note = Oligonucleotide
  source 1..25: mol_type = other DNA
ctaacactggcagctgctgagcact

SEQ ID NO: 37923 - DNA, 25 bp, synthetic construct
  misc_feature 1..25: note = Oligonucleotide
  source 1..25: mol_type = other DNA
ctactaacactggcagctgctgagc

SEQ ID NO: 37924 - DNA, 25 bp, synthetic construct
  misc_feature 1..25: note = Oligonucleotide
  source 1..25: mol_type = other DNA
cgtctactaacactggcagctgctg

SEQ ID NO: 37925 - DNA, 25 bp, synthetic construct
  misc_feature 1..25: note = Oligonucleotide
  source 1..25: mol_type = other DNA
ctacgtctactaacactggcagctg

SEQ ID NO: 37926 - DNA, 25 bp, synthetic construct
  misc_feature 1..25: note = Oligonucleotide
  source 1..25: mol_type = other DNA
catctacgtctactaacactggcag

SEQ ID NO: 37927 - DNA, 25 bp, synthetic construct
  misc_feature 1..25: note = Oligonucleotide
  source 1..25: mol_type = other DNA
cagcatctacgtctactaacactgg

SEQ ID NO: 37928 - DNA, 25 bp, synthetic construct
  misc_feature 1..25: note = Oligonucleotide
  source 1..25: mol_type = other DNA
aggcagcatctacgtctactaacac

SEQ ID NO: 37929 - DNA, 25 bp, synthetic construct
  misc_feature 1..25: note = Oligonucleotide
  source 1..25: mol_type = other DNA
aagaggcagcatctacgtctactaa

SEQ ID NO: 37930 - DNA, 25 bp, synthetic construct
  misc_feature 1..25: note = Oligonucleotide
  source 1..25: mol_type = other DNA
ctcaagaggcagcatctacgtctac

SEQ ID NO: 37931 - DNA, 25 bp, synthetic construct
  misc_feature 1..25: note = Oligonucleotide
  source 1..25: mol_type = other DNA
aacctcaagaggcagcatctacgtc

SEQ ID NO: 37932 - DNA, 25 bp, synthetic construct
  misc_feature 1..25: note = Oligonucleotide
  source 1..25: mol_type = other DNA
gccaacctcaagaggcagcatctac

SEQ ID NO: 37933 - DNA, 25 bp, synthetic construct
  misc_feature 1..25: note = Oligonucleotide
  source 1..25: mol_type = other DNA
tgtgccaacctcaagaggcagcatc

SEQ ID NO: 37934 - DNA, 25 bp, synthetic construct
  misc_feature 1..25: note = Oligonucleotide
  source 1..25: mol_type = other DNA
ctgtgtgccaacctcaagaggcagc

SEQ ID NO: 37935 - DNA, 25 bp, synthetic construct
  misc_feature 1..25: note = Oligonucleotide
  source 1..25: mol_type = other DNA
ccactgtgtgccaacctcaagaggc

SEQ ID NO: 37936 - DNA, 25 bp, synthetic construct
  misc_feature 1..25: note = Oligonucleotide
  source 1..25: mol_type = other DNA
cacccactgtgtgccaacctcaaga

SEQ ID NO: 37937 - DNA, 25 bp, synthetic construct
  misc_feature 1..25: note = Oligonucleotide
  source 1..25: mol_type = other DNA
gagcacccactgtgtgccaacctca

SEQ ID NO: 37938 - DNA, 25 bp, synthetic construct
  misc_feature 1..25: note = Oligonucleotide
  source 1..25: mol_type = other DNA
ctcgagcacccactgtgtgccaacc

SEQ ID NO: 37939 - DNA, 25 bp, synthetic construct
  misc_feature 1..25: note = Oligonucleotide
  source 1..25: mol_type = other DNA
tttctcgagcacccactgtgtgcca

SEQ ID NO: 37940 - DNA, 25 bp, synthetic construct
  misc_feature 1..25: note = Oligonucleotide
  source 1..25: mol_type = other DNA
gcatttctcgagcacccactgtgtg

SEQ ID NO: 37941 - DNA, 25 bp, synthetic construct
  misc_feature 1..25: note = Oligonucleotide
  source 1..25: mol_type = other DNA
agagcatttctcgagcacccactgt

SEQ ID NO: 37942 - DNA, 25 bp, synthetic construct
  misc_feature 1..25: note = Oligonucleotide
  source 1..25: mol_type = other DNA
cagagagcatttctcgagcacccac

SEQ ID NO: 37943 - DNA, 25 bp, synthetic construct
  misc_feature 1..25: note = Oligonucleotide
  source 1..25: mol_type = other DNA
tagcagagagcatttctcgagcacc

SEQ ID NO: 37944 - DNA, 25 bp, synthetic construct
  misc_feature 1..25: note = Oligonucleotide
  source 1..25: mol_type = other DNA
tcatagcagagagcatttctcgagc

SEQ ID NO: 37945 - DNA, 25 bp, synthetic construct
  misc_feature 1..25: note = Oligonucleotide
  source 1..25: mol_type = other DNA
aggtcatagcagagagcatttctcg

SEQ ID NO: 37946 - DNA, 25 bp, synthetic construct
  misc_feature 1..25: note = Oligonucleotide
  source 1..25: mol_type = other DNA
cctaggtcatagcagagagcatttc

SEQ ID NO: 37947 - DNA, 25 bp, synthetic construct
  misc_feature 1..25: note = Oligonucleotide
  source 1..25: mol_type = other DNA
ctgcctaggtcatagcagagagcat

SEQ ID NO: 37948 - DNA, 25 bp, synthetic construct
  misc_feature 1..25: note = Oligonucleotide
  source 1..25: mol_type = other DNA
tgtctgcctaggtcatagcagagag

SEQ ID NO: 37949 - DNA, 25 bp, synthetic construct
  misc_feature 1..25: note = Oligonucleotide
  source 1..25: mol_type = other DNA
ctttgtctgcctaggtcatagcaga

SEQ ID NO: 37950 - DNA, 25 bp, synthetic construct
  misc_feature 1..25: note = Oligonucleotide
  source 1..25: mol_type = other DNA
cctctttgtctgcctaggtcatagc

SEQ ID NO: 37951 - DNA, 25 bp, synthetic construct
  misc_feature 1..25: note = Oligonucleotide
  source 1..25: mol_type = other DNA
gaccctctttgtctgcctaggtcat

SEQ ID NO: 37952 - DNA, 25 bp, synthetic construct
  misc_feature 1..25: note = Oligonucleotide
  source 1..25: mol_type = other DNA
gcagaccctctttgtctgcctaggt

SEQ ID NO: 37953 - DNA, 25 bp, synthetic construct
  misc_feature 1..25: note = Oligonucleotide
  source 1..25: mol_type = other DNA
gaggcagaccctctttgtctgccta

SEQ ID NO: 37954 - DNA, 25 bp, synthetic construct
  misc_feature 1..25: note = Oligonucleotide
  source 1..25: mol_type = other DNA
gcagaggcagaccctctttgtctgc

SEQ ID NO: 37955 - DNA, 25 bp, synthetic construct
  misc_feature 1..25: note = Oligonucleotide
  source 1..25: mol_type = other DNA
ggggcagaggcagaccctctttgtc

SEQ ID NO: 37956 - DNA, 25 bp, synthetic construct
  misc_feature 1..25: note = Oligonucleotide
  source 1..25: mol_type = other DNA
ttgggggcagaggcagaccctcttt

SEQ ID NO: 37957 - DNA, 25 bp, synthetic construct
  misc_feature 1..25: note = Oligonucleotide
  source 1..25: mol_type = other DNA
cccttgggggcagaggcagaccctc

SEQ ID NO: 37958 - DNA, 25 bp, synthetic construct
  misc_feature 1..25: note = Oligonucleotide
  source 1..25: mol_type = other DNA
gaccccttgggggcagaggcagacc

SEQ ID NO: 37959 - DNA, 25 bp, synthetic construct
  misc_feature 1..25: note = Oligonucleotide
  source 1..25: mol_type = other DNA
tgggaccccttgggggcagaggcag

SEQ ID NO: 37960 - DNA, 25 bp, synthetic construct
  misc_feature 1..25: note = Oligonucleotide
  source 1..25: mol_type = other DNA
gggtgggaccccttgggggcagagg

SEQ ID NO: 37961 - DNA, 25 bp, synthetic construct
  misc_feature 1..25: note = Oligonucleotide
  source 1..25: mol_type = other DNA
cgggggtgggaccccttgggggcag

SEQ ID NO: 37962 - DNA, 25 bp, synthetic construct
  misc_feature 1..25: note = Oligonucleotide
  source 1..25: mol_type = other DNA
gggcgggggtgggaccccttggggg

SEQ ID NO: 37963 - DNA, 25 bp, synthetic construct
  misc_feature 1..25: note = Oligonucleotide
  source 1..25: mol_type = other DNA
ctggggcgggggtgggaccccttgg

SEQ ID NO: 37964 - DNA, 25 bp, synthetic construct
  misc_feature 1..25: note = Oligonucleotide
  source 1..25: mol_type = other DNA
catctggggcgggggtgggacccct

SEQ ID NO: 37965 - DNA, 25 bp, synthetic construct
  misc_feature 1..25: note = Oligonucleotide
  source 1..25: mol_type = other DNA
taccatctggggcgggggtgggacc

SEQ ID NO: 37966 - DNA, 25 bp, synthetic construct
  misc_feature 1..25: note = Oligonucleotide
  source 1..25: mol_type = other DNA
tgataccatctggggcgggggtggg

SEQ ID NO: 37967 - DNA, 25 bp, synthetic construct
  misc_feature 1..25: note = Oligonucleotide
  source 1..25: mol_type = other DNA
ttctgataccatctggggcgggggt

SEQ ID NO: 37968 - DNA, 25 bp, synthetic construct
  misc_feature 1..25: note = Oligonucleotide
  source 1..25: mol_type = other DNA
ctgttctgataccatctggggcggg

SEQ ID NO: 37969 - DNA, 25 bp, synthetic construct
  misc_feature 1..25: note = Oligonucleotide
  source 1..25: mol_type = other DNA
aatctgttctgataccatctggggc

SEQ ID NO: 37970 - DNA, 25 bp, synthetic construct
  misc_feature 1..25: note = Oligonucleotide
  source 1..25: mol_type = other DNA
gggaatctgttctgataccatctgg

SEQ ID NO: 37971 - DNA, 25 bp, synthetic construct
  misc_feature 1..25: note = Oligonucleotide
  source 1..25: mol_type = other DNA
atggggaatctgttctgataccatc

SEQ ID NO: 37972 - DNA, 25 bp, synthetic construct
  misc_feature 1..25: note = Oligonucleotide
  source 1..25: mol_type = other DNA
ggaatggggaatctgttctgatacc

SEQ ID NO: 37973 - DNA, 25 bp, synthetic construct
  misc_feature 1..25: note = Oligonucleotide
  source 1..25: mol_type = other DNA
catggaatggggaatctgttctgat

SEQ ID NO: 37974 - DNA, 25 bp, synthetic construct
  misc_feature 1..25: note = Oligonucleotide
  source 1..25: mol_type = other DNA
cagcatggaatggggaatctgttct

SEQ ID NO: 37975 - DNA, 25 bp, synthetic construct
  misc_feature 1..25: note = Oligonucleotide
  source 1..25: mol_type = other DNA
cctcagcatggaatggggaatctgt

SEQ ID NO: 37976 - DNA, 25 bp, synthetic construct
  misc_feature 1..25: note = Oligonucleotide
  source 1..25: mol_type = other DNA
ttgcctcagcatggaatggggaatc

SEQ ID NO: 37977 - DNA, 25 bp, synthetic construct
  misc_feature 1..25: note = Oligonucleotide
  source 1..25: mol_type = other DNA
cacttgcctcagcatggaatgggga

SEQ ID NO: 37978 - DNA, 25 bp, synthetic construct
  misc_feature 1..25: note = Oligonucleotide
  source 1..25: mol_type = other DNA
agtcacttgcctcagcatggaatgg

SEQ ID NO: 37979 - DNA, 25 bp, synthetic construct
  misc_feature 1..25: note = Oligonucleotide
  source 1..25: mol_type = other DNA
aaaagtcacttgcctcagcatggaa

SEQ ID NO: 37980 - DNA, 25 bp, synthetic construct
  misc_feature 1..25: note = Oligonucleotide
  source 1..25: mol_type = other DNA
aagaaaagtcacttgcctcagcatg

SEQ ID NO: 37981 - DNA, 25 bp, synthetic construct
  misc_feature 1..25: note = Oligonucleotide
  source 1..25: mol_type = other DNA
gtaaagaaaagtcacttgcctcagc

SEQ ID NO: 37982 - DNA, 25 bp, synthetic construct
  misc_feature 1..25: note = Oligonucleotide
  source 1..25: mol_type = other DNA
agggtaaagaaaagtcacttgcctc

SEQ ID NO: 37983 - DNA, 25 bp, synthetic construct
  misc_feature 1..25: note = Oligonucleotide
  source 1..25: mol_type = other DNA
cttagggtaaagaaaagtcacttgc

SEQ ID NO: 37984 - DNA, 25 bp, synthetic construct
  misc_feature 1..25: note = Oligonucleotide
  source 1..25: mol_type = other DNA
tgacttagggtaaagaaaagtcact

SEQ ID NO: 37985 - DNA, 25 bp, synthetic construct
  misc_feature 1..25: note = Oligonucleotide
  source 1..25: mol_type = other DNA
ttctgacttagggtaaagaaaagtc

SEQ ID NO: 37986 - DNA, 25 bp, synthetic construct
  misc_feature 1..25: note = Oligonucleotide
  source 1..25: mol_type = other DNA
aagttctgacttagggtaaagaaaa

SEQ ID NO: 37987 - DNA, 25 bp, synthetic construct
  misc_feature 1..25: note = Oligonucleotide
  source 1..25: mol_type = other DNA
gccaagttctgacttagggtaaaga

SEQ ID NO: 37988 - DNA, 25 bp, synthetic construct
  misc_feature 1..25: note = Oligonucleotide
  source 1..25: mol_type = other DNA
catgccaagttctgacttagggtaa

SEQ ID NO: 37989 - DNA, 25 bp, synthetic construct
  misc_feature 1..25: note = Oligonucleotide
  source 1..25: mol_type = other DNA
tagcatgccaagttctgacttaggg

SEQ ID NO: 37990 - DNA, 25 bp, synthetic construct
  misc_feature 1..25: note = Oligonucleotide
  source 1..25: mol_type = other DNA
taatagcatgccaagttctgactta

SEQ ID NO: 37991 - DNA, 25 bp, synthetic construct
  misc_feature 1..25: note = Oligonucleotide
  source 1..25: mol_type = other DNA
tgctaatagcatgccaagttctgac

SEQ ID NO: 37992 - DNA, 25 bp, synthetic construct
  misc_feature 1..25: note = Oligonucleotide
  source 1..25: mol_type = other DNA
taatgctaatagcatgccaagttct

SEQ ID NO: 37993 - DNA, 25 bp, synthetic construct
  misc_feature 1..25: note = Oligonucleotide
  source 1..25: mol_type = other DNA
acttaatgctaatagcatgccaagt

SEQ ID NO: 37994 - DNA, 25 bp, synthetic construct
  misc_feature 1..25: note = Oligonucleotide
  source 1..25: mol_type = other DNA
gaaacttaatgctaatagcatgcca

SEQ ID NO: 37995 - DNA, 25 bp, synthetic construct
  misc_feature 1..25: note = Oligonucleotide
  source 1..25: mol_type = other DNA
ggggaaacttaatgctaatagcatg

SEQ ID NO: 37996 - DNA, 25 bp, synthetic construct
  misc_feature 1..25: note = Oligonucleotide
  source 1..25: mol_type = other DNA
taaggggaaacttaatgctaatagc

SEQ ID NO: 37997 - DNA, 25 bp, synthetic construct
  misc_feature 1..25: note = Oligonucleotide
  source 1..25: mol_type = other DNA
aaataaggggaaacttaatgctaat

SEQ ID NO: 37998 - DNA, 25 bp, synthetic construct
  misc_feature 1..25: note = Oligonucleotide
  source 1..25: mol_type = other DNA
atgaaataaggggaaacttaatgct

SEQ ID NO: 37999 - DNA, 25 bp, synthetic construct
  misc_feature 1..25: note = Oligonucleotide
  source 1..25: mol_type = other DNA
aagatgaaataaggggaaacttaat

SEQ ID NO: 38000 - DNA, 25 bp, synthetic construct
  misc_feature 1..25: note = Oligonucleotide
  source 1..25: mol_type = other DNA
gcaaagatgaaataaggggaaactt

SEQ ID NO: 38001 - DNA, 25 bp, synthetic construct
  misc_feature 1..25: note = Oligonucleotide
  source 1..25: mol_type = other DNA
cgtgcaaagatgaaataaggggaaa

SEQ ID NO: 38002 - DNA, 25 bp, synthetic construct
  misc_feature 1..25: note = Oligonucleotide
  source 1..25: mol_type = other DNA
tgacgtgcaaagatgaaataagggg

SEQ ID NO: 38003 - DNA, 25 bp, synthetic construct
  misc_feature 1..25: note = Oligonucleotide
  source 1..25: mol_type = other DNA
gagtgacgtgcaaagatgaaataag

SEQ ID NO: 38004 - DNA, 25 bp, synthetic construct
  misc_feature 1..25: note = Oligonucleotide
  source 1..25: mol_type = other DNA
cgggagtgacgtgcaaagatgaaat

SEQ ID NO: 38005 - DNA, 25 bp, synthetic construct
  misc_feature 1..25: note = Oligonucleotide
  source 1..25: mol_type = other DNA
aggcgggagtgacgtgcaaagatga

SEQ ID NO: 38006 - DNA, 25 bp, synthetic construct
  misc_feature 1..25: note = Oligonucleotide
  source 1..25: mol_type = other DNA
agaaggcgggagtgacgtgcaaaga

SEQ ID NO: 38007 - DNA, 25 bp, synthetic construct
  misc_feature 1..25: note = Oligonucleotide
  source 1..25: mol_type = other DNA
tgcagaaggcgggagtgacgtgcaa

SEQ ID NO: 38008 - DNA, 25 bp, synthetic construct
  misc_feature 1..25: note = Oligonucleotide
  source 1..25: mol_type = other DNA
ggatgcagaaggcgggagtgacgtg

SEQ ID NO: 38009 - DNA, 25 bp, synthetic construct
  misc_feature 1..25: note = Oligonucleotide
  source 1..25: mol_type = other DNA
tgaggatgcagaaggcgggagtgac

SEQ ID NO: 38010 - DNA, 25 bp, synthetic construct
  misc_feature 1..25: note = Oligonucleotide
  source 1..25: mol_type = other DNA
ccttgaggatgcagaaggcgggagt

SEQ ID NO: 38011 - DNA, 25 bp, synthetic construct
  misc_feature 1..25: note = Oligonucleotide
  source 1..25: mol_type = other DNA
gcaccttgaggatgcagaaggcggg

SEQ ID NO: 38012 - DNA, 25 bp, synthetic construct
  misc_feature 1..25: note = Oligonucleotide
  source 1..25: mol_type = other DNA
agcgcaccttgaggatgcagaaggc

SEQ ID NO: 38013 - DNA, 25 bp, synthetic construct
  misc_feature 1..25: note = Oligonucleotide
  source 1..25: mol_type = other DNA
atgagcgcaccttgaggatgcagaa

SEQ ID NO: 38014 - DNA, 25 bp, synthetic construct
  misc_feature 1..25: note = Oligonucleotide
  source 1..25: mol_type = other DNA
agaatgagcgcaccttgaggatgca

SEQ ID NO: 38015 - DNA, 25 bp, synthetic construct
  misc_feature 1..25: note = Oligonucleotide
  source 1..25: mol_type = other DNA
cgcagaatgagcgcaccttgaggat

SEQ ID NO: 38016 - DNA, 25 bp, synthetic construct
  misc_feature 1..25: note = Oligonucleotide
  source 1..25: mol_type = other DNA
cgacgcagaatgagcgcaccttgag

SEQ ID NO: 38017 - DNA, 25 bp, synthetic construct
  misc_feature 1..25: note = Oligonucleotide
  source 1..25: mol_type = other DNA
gagcgacgcagaatgagcgcacctt

SEQ ID NO: 38018 - DNA, 25 bp, synthetic construct
  misc_feature 1..25: note = Oligonucleotide
  source 1..25: mol_type = other DNA
atggagcgacgcagaatgagcgcac

SEQ ID NO: 38019 - DNA, 25 bp, synthetic construct
  misc_feature 1..25: note = Oligonucleotide
  source 1..25: mol_type = other DNA
tagatggagcgacgcagaatgagcg

SEQ ID NO: 38020 - DNA, 25 bp, synthetic construct
  misc_feature 1..25: note = Oligonucleotide
  source 1..25: mol_type = other DNA
tgttagatggagcgacgcagaatga

SEQ ID NO: 38021 - DNA, 25 bp, synthetic construct
  misc_feature 1..25: note = Oligonucleotide
  source 1..25: mol_type = other DNA
atgtgttagatggagcgacgcagaa

SEQ ID NO: 38022 - DNA, 25 bp, synthetic construct
  misc_feature 1..25: note = Oligonucleotide
  source 1..25: mol_type = other DNA
cctatgtgttagatggagcgacgca

SEQ ID NO: 38023 - DNA, 25 bp, synthetic construct
  misc_feature 1..25: note = Oligonucleotide
  source 1..25: mol_type = other DNA
cagcctatgtgttagatggagcgac

SEQ ID NO: 38024 - DNA, 25 bp, synthetic construct
  misc_feature 1..25: note = Oligonucleotide
  source 1..25: mol_type = other DNA
ccacagcctatgtgttagatggagc

SEQ ID NO: 38025 - DNA, 25 bp, synthetic construct
  misc_feature 1..25: note = Oligonucleotide
  source 1..25: mol_type = other DNA
cacccacagcctatgtgttagatgg

SEQ ID NO: 38026 - DNA, 25 bp, synthetic construct
  misc_feature 1..25: note = Oligonucleotide
  source 1..25: mol_type = other DNA
gaacacccacagcctatgtgttaga

SEQ ID NO: 38027 - DNA, 25 bp, synthetic construct
  misc_feature 1..25: note = Oligonucleotide
  source 1..25: mol_type = other DNA
agtgaacacccacagcctatgtgtt

SEQ ID NO: 38028 - DNA, 25 bp, synthetic construct
  misc_feature 1..25: note = Oligonucleotide
  source 1..25: mol_type = other DNA
cgcagtgaacacccacagcctatgt

SEQ ID NO: 38029 - DNA, 25 bp, synthetic construct
  misc_feature 1..25: note = Oligonucleotide
  source 1..25: mol_type = other DNA
acacgcagtgaacacccacagccta

SEQ ID NO: 38030 - DNA, 25 bp, synthetic construct
  misc_feature 1..25: note = Oligonucleotide
  source 1..25: mol_type = other DNA
tgaacacgcagtgaacacccacagc

SEQ ID NO: 38031 - DNA, 25 bp, synthetic construct
  misc_feature 1..25: note = Oligonucleotide
  source 1..25: mol_type = other DNA
gtatgaacacgcagtgaacacccac

SEQ ID NO: 38032 - DNA, 25 bp, synthetic construct
  misc_feature 1..25: note = Oligonucleotide
  source 1..25: mol_type = other DNA
tgtgtatgaacacgcagtgaacacc

SEQ ID NO: 38033 - DNA, 25 bp, synthetic construct
  misc_feature 1..25: note = Oligonucleotide
  source 1..25: mol_type = other DNA
cactgtgtatgaacacgcagtgaac

SEQ ID NO: 38034 - DNA, 25 bp, synthetic construct
  misc_feature 1..25: note = Oligonucleotide
  source 1..25: mol_type = other DNA
ctgcactgtgtatgaacacgcagtg

SEQ ID NO: 38035 - DNA, 25 bp, synthetic construct
  misc_feature 1..25: note = Oligonucleotide
  source 1..25: mol_type = other DNA
tccctgcactgtgtatgaacacgca

SEQ ID NO: 38036 - DNA, 25 bp, synthetic construct
  misc_feature 1..25: note = Oligonucleotide
  source 1..25: mol_type = other DNA
cattccctgcactgtgtatgaacac

SEQ ID NO: 38037 - DNA, 25 bp, synthetic construct
  misc_feature 1..25: note = Oligonucleotide
  source 1..25: mol_type = other DNA
ctgcattccctgcactgtgtatgaa

SEQ ID NO: 38038 - DNA, 25 bp, synthetic construct
  misc_feature 1..25: note = Oligonucleotide
  source 1..25: mol_type = other DNA
ctgctgcattccctgcactgtgtat

SEQ ID NO: 38039 - DNA, 25 bp, synthetic construct
  misc_feature 1..25: note = Oligonucleotide
  source 1..25: mol_type = other DNA
ctcctgctgcattccctgcactgtg

SEQ ID NO: 38040 - DNA, 25 bp, synthetic construct
  misc_feature 1..25: note = Oligonucleotide
  source 1..25: mol_type = other DNA
ggtctcctgctgcattccctgcact

SEQ ID NO: 38041 - DNA, 25 bp, synthetic construct
  misc_feature 1..25: note = Oligonucleotide
  source 1..25: mol_type = other DNA
ctgggtctcctgctgcattccctgc

SEQ ID NO: 38042 - DNA, 25 bp, synthetic construct
  misc_feature 1..25: note = Oligonucleotide
  source 1..25: mol_type = other DNA
gtcctgggtctcctgctgcattccc

SEQ ID NO: 38043 - DNA, 25 bp, synthetic construct
  misc_feature 1..25: note = Oligonucleotide
  source 1..25: mol_type = other DNA
ttcgtcctgggtctcctgctgcatt

SEQ ID NO: 38044 - DNA, 25 bp, synthetic construct
  misc_feature 1..25: note = Oligonucleotide
  source 1..25: mol_type = other DNA
cagttcgtcctgggtctcctgctgc

SEQ ID NO: 38045 - DNA, 25 bp, synthetic construct
  misc_feature 1..25: note = Oligonucleotide
  source 1..25: mol_type = other DNA
gcccagttcgtcctgggtctcctgc

SEQ ID NO: 38046 - DNA, 25 bp, synthetic construct
  misc_feature 1..25: note = Oligonucleotide
  source 1..25: mol_type = other DNA
tgtgcccagttcgtcctgggtctcc

SEQ ID NO: 38047 - DNA, 25 bp, synthetic construct
  misc_feature 1..25: note = Oligonucleotide
  source 1..25: mol_type = other DNA
aattgtgcccagttcgtcctgggtc

SEQ ID NO: 38048 - DNA, 25 bp, synthetic construct
  misc_feature 1..25: note = Oligonucleotide
  source 1..25: mol_type = other DNA
agaaattgtgcccagttcgtcctgg

SEQ ID NO: 38049 - DNA, 25 bp, synthetic construct
  misc_feature 1..25: note = Oligonucleotide
  source 1..25: mol_type = other DNA
cagagaaattgtgcccagttcgtcc

SEQ ID NO: 38050 - DNA, 25 bp, synthetic construct
  misc_feature 1..25: note = Oligonucleotide
  source 1..25: mol_type = other DNA
ggacagagaaattgtgcccagttcg

SEQ ID NO: 38051 - DNA, 25 bp, synthetic construct
  misc_feature 1..25: note = Oligonucleotide
  source 1..25: mol_type = other DNA
gctggacagagaaattgtgcccagt

SEQ ID NO: 38052 - DNA, 25 bp, synthetic construct
  misc_feature 1..25: note = Oligonucleotide
  source 1..25: mol_type = other DNA
accgctggacagagaaattgtgccc

SEQ ID NO: 38053 - DNA, 25 bp, synthetic construct
  misc_feature 1..25: note = Oligonucleotide
  source 1..25: mol_type = other DNA
ccaaccgctggacagagaaattgtg

SEQ ID NO: 38054 - DNA, 25 bp, synthetic construct
  misc_feature 1..25: note = Oligonucleotide
  source 1..25: mol_type = other DNA
tccccaaccgctggacagagaaatt

SEQ ID NO: 38055 - DNA, 25 bp, synthetic construct
  misc_feature 1..25: note = Oligonucleotide
  source 1..25: mol_type = other DNA
ccatccccaaccgctggacagagaa

SEQ ID NO: 38056 - DNA, 25 bp, synthetic construct
  misc_feature 1..25: note = Oligonucleotide
  source 1..25: mol_type = other DNA
cccccatccccaaccgctggacaga

SEQ ID NO: 38057 - DNA, 25 bp, synthetic construct
  misc_feature 1..25: note = Oligonucleotide
  source 1..25: mol_type = other DNA
ttccccccatccccaaccgctggac

SEQ ID NO: 38058 - DNA, 25 bp, synthetic construct
  misc_feature 1..25: note = Oligonucleotide
  source 1..25: mol_type = other DNA
gccttccccccatccccaaccgctg

SEQ ID NO: 38059 - DNA, 25 bp, synthetic construct
  misc_feature 1..25: note = Oligonucleotide
  source 1..25: mol_type = other DNA
tctgccttccccccatccccaaccg

SEQ ID NO: 38060 - DNA, 25 bp, synthetic construct
  misc_feature 1..25: note = Oligonucleotide
  source 1..25: mol_type = other DNA
aggtctgccttccccccatccccaa

SEQ ID NO: 38061 - DNA, 25 bp, synthetic construct
  misc_feature 1..25: note = Oligonucleotide
  source 1..25: mol_type = other DNA
tttaggtctgccttccccccatccc

SEQ ID NO: 38062 - DNA, 25 bp, synthetic construct
  misc_feature 1..25: note = Oligonucleotide
  source 1..25: mol_type = other DNA
atttttaggtctgccttccccccat

SEQ ID NO: 38063 - DNA, 25 bp, synthetic construct
  misc_feature 1..25: note = Oligonucleotide
  source 1..25: mol_type = other DNA
gtgatttttaggtctgccttccccc

SEQ ID NO: 38064 - DNA, 25 bp, synthetic construct
  misc_feature 1..25: note = Oligonucleotide
  source 1..25: mol_type = other DNA
atcgtgatttttaggtctgccttcc

SEQ ID NO: 38065 - DNA, 25 bp, synthetic construct
  misc_feature 1..25: note = Oligonucleotide
  source 1..25: mol_type = other DNA
atcatcgtgatttttaggtctgcct

SEQ ID NO: 38066 - DNA, 25 bp, synthetic construct
  misc_feature 1..25: note = Oligonucleotide
  source 1..25: mol_type = other DNA
atcatcatcgtgatttttaggtctg

SEQ ID NO: 38067 - DNA, 25 bp, synthetic construct
  misc_feature 1..25: note = Oligonucleotide
  source 1..25: mol_type = other DNA
gtcatcatcatcgtgatttttaggt

SEQ ID NO: 38068 - DNA, 25 bp, synthetic construct
  misc_feature 1..25: note = Oligonucleotide
  source 1..25: mol_type = other DNA
gaggtcatcatcatcgtgattttta

SEQ ID NO: 38069 - DNA, 25 bp, synthetic construct
  misc_feature 1..25: note = Oligonucleotide
  source 1..25: mol_type = other DNA
gccgaggtcatcatcatcgtgattt

SEQ ID NO: 38070 - DNA, 25 bp, synthetic construct
  misc_feature 1..25: note = Oligonucleotide
  source 1..25: mol_type = other DNA
ggggccgaggtcatcatcatcgtga

SEQ ID NO: 38071 - DNA, 25 bp, synthetic construct
  misc_feature 1..25: note = Oligonucleotide
  source 1..25: mol_type = other DNA
aagggggccgaggtcatcatcatcg

SEQ ID NO: 38072 - DNA, 25 bp, synthetic construct
  misc_feature 1..25: note = Oligonucleotide
  source 1..25: mol_type = other DNA
gggaagggggccgaggtcatcatca

SEQ ID NO: 38073 - DNA, 25 bp, synthetic construct
  misc_feature 1..25: note = Oligonucleotide
  source 1..25: mol_type = other DNA
tgggggaagggggccgaggtcatca

SEQ ID NO: 38074 - DNA, 25 bp, synthetic construct
  misc_feature 1..25: note = Oligonucleotide
  source 1..25: mol_type = other DNA
gaatgggggaagggggccgaggtca

SEQ ID NO: 38075 - DNA, 25 bp, synthetic construct
  misc_feature 1..25: note = Oligonucleotide
  source 1..25: mol_type = other DNA
tgggaatgggggaagggggccgagg

SEQ ID NO: 38076 - DNA, 25 bp, synthetic construct
  misc_feature 1..25: note = Oligonucleotide
  source 1..25: mol_type = other DNA
tcctgggaatgggggaagggggccg

SEQ ID NO: 38077 - DNA, 25 bp, synthetic construct
  misc_feature 1..25: note = Oligonucleotide
  source 1..25: mol_type = other DNA
gtatcctgggaatgggggaaggggg

SEQ ID NO: 38078 - DNA, 25 bp, synthetic construct
  misc_feature 1..25: note = Oligonucleotide
  source 1..25: mol_type = other DNA
gcagtatcctgggaatgggggaagg

SEQ ID NO: 38079 - DNA, 25 bp, synthetic construct
  misc_feature 1..25: note = Oligonucleotide
  source 1..25: mol_type = other DNA
gcagcagtatcctgggaatggggga

SEQ ID NO: 38080 - DNA, 25 bp, synthetic construct
  misc_feature 1..25: note = Oligonucleotide
  source 1..25: mol_type = other DNA
actgcagcagtatcctgggaatggg

SEQ ID NO: 38081 - DNA, 25 bp, synthetic construct
  misc_feature 1..25: note = Oligonucleotide
  source 1..25: mol_type = other DNA
tgaactgcagcagtatcctgggaat

SEQ ID NO: 38082 - DNA, 25 bp, synthetic construct
  misc_feature 1..25: note = Oligonucleotide
  source 1..25: mol_type = other DNA
ggctgaactgcagcagtatcctggg

SEQ ID NO: 38083 - DNA, 25 bp, synthetic construct
  misc_feature 1..25: note = Oligonucleotide
  source 1..25: mol_type = other DNA
cagggctgaactgcagcagtatcct

SEQ ID NO: 38084 - DNA, 25 bp, synthetic construct
  misc_feature 1..25: note = Oligonucleotide
  source 1..25: mol_type = other DNA
gtgcagggctgaactgcagcagtat

SEQ ID NO: 38085 - DNA, 25 bp, synthetic construct
  misc_feature 1..25: note = Oligonucleotide
  source 1..25: mol_type = other DNA
acagtgcagggctgaactgcagcag

SEQ ID NO: 38086 - DNA, 25 bp, synthetic construct
  misc_feature 1..25: note = Oligonucleotide
  source 1..25: mol_type = other DNA
tttacagtgcagggctgaactgcag

SEQ ID NO: 38087 - DNA, 25 bp, synthetic construct
  misc_feature 1..25: note = Oligonucleotide
  source 1..25: mol_type = other DNA
acctttacagtgcagggctgaactg

SEQ ID NO: 38088 - DNA, 25 bp, synthetic construct
  misc_feature 1..25: note = Oligonucleotide
  source 1..25: mol_type = other DNA
ttcacctttacagtgcagggctgaa

SEQ ID NO: 38089 - DNA, 25 bp, synthetic construct
  misc_feature 1..25: note = Oligonucleotide
  source 1..25: mol_type = other DNA
gatttcacctttacagtgcagggct

SEQ ID NO: 38090 - DNA, 25 bp, synthetic construct
  misc_feature 1..25: note = Oligonucleotide
  source 1..25: mol_type = other DNA
ggcgatttcacctttacagtgcagg

SEQ ID NO: 38091 - DNA, 25 bp, synthetic construct
  misc_feature 1..25: note = Oligonucleotide
  source 1..25: mol_type = other DNA
tggggcgatttcacctttacagtgc

SEQ ID NO: 38092 - DNA, 25 bp, synthetic construct
  misc_feature 1..25: note = Oligonucleotide
  source 1..25: mol_type = other DNA
ttgtggggcgatttcacctttacag

SEQ ID NO: 38093 - DNA, 25 bp, synthetic construct
  misc_feature 1..25: note = Oligonucleotide
  source 1..25: mol_type = other DNA
ctattgtggggcgatttcaccttta

SEQ ID NO: 38094 - DNA, 25 bp, synthetic construct
  misc_feature 1..25: note = Oligonucleotide
  source 1..25: mol_type = other DNA
caactattgtggggcgatttcacct

SEQ ID NO: 38095 - DNA, 25 bp, synthetic construct
  misc_feature 1..25: note = Oligonucleotide
  source 1..25: mol_type = other DNA
ctgcaactattgtggggcgatttca

SEQ ID NO: 38096 - DNA, 25 bp, synthetic construct
  misc_feature 1..25: note = Oligonucleotide
  source 1..25: mol_type = other DNA
agcctgcaactattgtggggcgatt

SEQ ID NO: 38097 - DNA, 25 bp, synthetic construct
  misc_feature 1..25: note = Oligonucleotide
  source 1..25: mol_type = other DNA
gacagcctgcaactattgtggggcg

SEQ ID NO: 38098 - DNA, 25 bp, synthetic construct
  misc_feature 1..25: note = Oligonucleotide
  source 1..25: mol_type = other DNA
gaggacagcctgcaactattgtggg

SEQ ID NO: 38099 - DNA, 25 bp, synthetic construct
  misc_feature 1..25: note = Oligonucleotide
  source 1..25: mol_type = other DNA
caagaggacagcctgcaactattgt

SEQ ID NO: 38100 - DNA, 25 bp, synthetic construct
  misc_feature 1..25: note = Oligonucleotide
  source 1..25: mol_type = other DNA
tgtcaagaggacagcctgcaactat

SEQ ID NO: 38101 - DNA, 25 bp, synthetic construct
  misc_feature 1..25: note = Oligonucleotide
  source 1..25: mol_type = other DNA
tcatgtcaagaggacagcctgcaac

SEQ ID NO: 38102 - DNA, 25 bp, synthetic construct
  misc_feature 1..25: note = Oligonucleotide
  source 1..25: mol_type = other DNA
tcctcatgtcaagaggacagcctgc

SEQ ID NO: 38103 - DNA, 25 bp, synthetic construct
  misc_feature 1..25: note = Oligonucleotide
  source 1..25: mol_type = other DNA
gtttcctcatgtcaagaggacagcc

SEQ ID NO: 38104 - DNA, 25 bp, synthetic construct
  misc_feature 1..25: note = Oligonucleotide
  source 1..25: mol_type = other DNA
tcagtttcctcatgtcaagaggaca

SEQ ID NO: 38105 - DNA, 25 bp, synthetic construct
  misc_feature 1..25: note = Oligonucleotide
  source 1..25: mol_type = other DNA
acttcagtttcctcatgtcaagagg

SEQ ID NO: 38106 - DNA, 25 bp, synthetic construct
  misc_feature 1..25: note = Oligonucleotide
  source 1..25: mol_type = other DNA
ggaacttcagtttcctcatgtcaag

SEQ ID NO: 38107 - DNA, 25 bp, synthetic construct
  misc_feature 1..25: note = Oligonucleotide
  source 1..25: mol_type = other DNA
ctaggaacttcagtttcctcatgtc

SEQ ID NO: 38108 - DNA, 25 bp, synthetic construct
  misc_feature 1..25: note = Oligonucleotide
  source 1..25: mol_type = other DNA
cctctaggaacttcagtttcctcat

SEQ ID NO: 38109 - DNA, 25 bp, synthetic construct
  misc_feature 1..25: note = Oligonucleotide
  source 1..25: mol_type = other DNA
aagcctctaggaacttcagtttcct

SEQ ID NO: 38110 - DNA, 25 bp, synthetic construct
  misc_feature 1..25: note = Oligonucleotide
  source 1..25: mol_type = other DNA
cagaagcctctaggaacttcagttt

SEQ ID NO: 38111 - DNA, 25 bp, synthetic construct
  misc_feature 1..25: note = Oligonucleotide
  source 1..25: mol_type = other DNA
cttcagaagcctctaggaacttcag

SEQ ID NO: 38112 - DNA, 25 bp, synthetic construct
  misc_feature 1..25: note = Oligonucleotide
  source 1..25: mol_type = other DNA
gaacttcagaagcctctaggaactt

SEQ ID NO: 38113 - DNA, 25 bp, synthetic construct
  misc_feature 1..25: note = Oligonucleotide
  source 1..25: mol_type = other DNA
caggaacttcagaagcctctaggaa

SEQ ID NO: 38114 - DNA, 25 bp, synthetic construct
  misc_feature 1..25: note = Oligonucleotide
  source 1..25: mol_type = other DNA
tgccaggaacttcagaagcctctag

SEQ ID NO: 38115 - DNA, 25 bp, synthetic construct
  misc_feature 1..25: note = Oligonucleotide
  source 1..25: mol_type = other DNA
atctgccaggaacttcagaagcctc

SEQ ID NO: 38116 - DNA, 25 bp, synthetic construct
  misc_feature 1..25: note = Oligonucleotide
  source 1..25: mol_type = other DNA
tagatctgccaggaacttcagaagc

SEQ ID NO: 38117 - DNA, 25 bp, synthetic construct
  misc_feature 1..25: note = Oligonucleotide
  source 1..25: mol_type = other DNA
ttttagatctgccaggaacttcaga

SEQ ID NO: 38118 - DNA, 25 bp, synthetic construct
  misc_feature 1..25: note = Oligonucleotide
  source 1..25: mol_type = other DNA
gaattttagatctgccaggaacttc

SEQ ID NO: 38119 - DNA, 25 bp, synthetic construct
  misc_feature 1..25: note = Oligonucleotide
  source 1..25: mol_type = other DNA
cttgaattttagatctgccaggaac

SEQ ID NO: 38120 - DNA, 25 bp, synthetic construct
  misc_feature 1..25: note = Oligonucleotide
  source 1..25: mol_type = other DNA
aggcttgaattttagatctgccagg

SEQ ID NO: 38121 - DNA, 25 bp, synthetic construct
  misc_feature 1..25: note = Oligonucleotide
  source 1..25: mol_type = other DNA
cctaggcttgaattttagatctgcc

SEQ ID NO: 38122 - DNA, 25 bp, synthetic construct
  misc_feature 1..25: note = Oligonucleotide
  source 1..25: mol_type = other DNA
agacctaggcttgaattttagatct

SEQ ID NO: 38123 - DNA, 25 bp, synthetic construct
  misc_feature 1..25: note = Oligonucleotide
  source 1..25: mol_type = other DNA
tacagacctaggcttgaattttaga

SEQ ID NO: 38124 - DNA, 25 bp, synthetic construct
  misc_feature 1..25: note = Oligonucleotide
  source 1..25: mol_type = other DNA
gtgtacagacctaggcttgaatttt

SEQ ID NO: 38125 - DNA, 25 bp, synthetic construct
  misc_feature 1..25: note = Oligonucleotide
  source 1..25: mol_type = other DNA
tttgtgtacagacctaggcttgaat

SEQ ID NO: 38126 - DNA, 25 bp, synthetic construct
  misc_feature 1..25: note = Oligonucleotide
  source 1..25: mol_type = other DNA
gcttttgtgtacagacctaggcttg

SEQ ID NO: 38127 - DNA, 25 bp, synthetic construct
  misc_feature 1..25: note = Oligonucleotide
  source 1..25: mol_type = other DNA
tgggcttttgtgtacagacctaggc

SEQ ID NO: 38128 - DNA, 25 bp, synthetic construct
  misc_feature 1..25: note = Oligonucleotide
  source 1..25: mol_type = other DNA
gggtgggcttttgtgtacagaccta

SEQ ID NO: 38129 - DNA, 25 bp, synthetic construct
  misc_feature 1..25: note = Oligonucleotide
  source 1..25: mol_type = other DNA
caagggtgggcttttgtgtacagac

SEQ ID NO: 38130 - DNA, 25 bp, synthetic construct
  misc_feature 1..25: note = Oligonucleotide
  source 1..25: mol_type = other DNA
taccaagggtgggcttttgtgtaca

SEQ ID NO: 38131 - DNA, 25 bp, synthetic construct
  misc_feature 1..25: note = Oligonucleotide
  source 1..25: mol_type = other DNA
aggtaccaagggtgggcttttgtgt

SEQ ID NO: 38132 - DNA, 25 bp, synthetic construct
  misc_feature 1..25: note = Oligonucleotide
  source 1..25: mol_type = other DNA
ccaaggtaccaagggtgggcttttg

SEQ ID NO: 38133 - DNA, 25 bp, synthetic construct
  misc_feature 1..25: note = Oligonucleotide
  source 1..25: mol_type = other DNA
tagccaaggtaccaagggtgggctt

SEQ ID NO: 38134 - DNA, 25 bp, synthetic construct
  misc_feature 1..25: note = Oligonucleotide
  source 1..25: mol_type = other DNA
ttgtagccaaggtaccaagggtggg

SEQ ID NO: 38135 - DNA, 25 bp, synthetic construct
  misc_feature 1..25: note = Oligonucleotide
  source 1..25: mol_type = other DNA
tctttgtagccaaggtaccaagggt

SEQ ID NO: 38136 - DNA, 25 bp, synthetic construct
  misc_feature 1..25: note = Oligonucleotide
  source 1..25: mol_type = other DNA
atctctttgtagccaaggtaccaag

SEQ ID NO: 38137 - DNA, 25 bp, synthetic construct
  misc_feature 1..25: note = Oligonucleotide
  source 1..25: mol_type = other DNA
aatatctctttgtagccaaggtacc

SEQ ID NO: 38138 - DNA, 25 bp, synthetic construct
  misc_feature 1..25: note = Oligonucleotide
  source 1..25: mol_type = other DNA
cataatatctctttgtagccaaggt

SEQ ID NO: 38139 - DNA, 25 bp, synthetic construct
  misc_feature 1..25: note = Oligonucleotide
  source 1..25: mol_type = other DNA
gggcataatatctctttgtagccaa

SEQ ID NO: 38140 - DNA, 25 bp, synthetic construct
  misc_feature 1..25: note = Oligonucleotide
  source 1..25: mol_type = other DNA
gctgggcataatatctctttgtagc

SEQ ID NO: 38141 - DNA, 25 bp, synthetic construct
  misc_feature 1..25: note = Oligonucleotide
  source 1..25: mol_type = other DNA
cttgctgggcataatatctctttgt

SEQ ID NO: 38142 - DNA, 25 bp, synthetic construct
  misc_feature 1..25: note = Oligonucleotide
  source 1..25: mol_type = other DNA
cttcttgctgggcataatatctctt

SEQ ID NO: 38143 - DNA, 25 bp, synthetic construct
  misc_feature 1..25: note = Oligonucleotide
  source 1..25: mol_type = other DNA
ctgcttcttgctgggcataatatct

SEQ ID NO: 38144 - DNA, 25 bp, synthetic construct
  misc_feature 1..25: note = Oligonucleotide
  source 1..25: mol_type = other DNA
acactgcttcttgctgggcataata

SEQ ID NO: 38145 - DNA, 25 bp, synthetic construct
  misc_feature 1..25: note = Oligonucleotide
  source 1..25: mol_type = other DNA
actacactgcttcttgctgggcata

SEQ ID NO: 38146 - DNA, 25 bp, synthetic construct
  misc_feature 1..25: note = Oligonucleotide
  source 1..25: mol_type = other DNA
agtactacactgcttcttgctgggc

SEQ ID NO: 38147 - DNA, 25 bp, synthetic construct
  misc_feature 1..25: note = Oligonucleotide
  source 1..25: mol_type = other DNA
tccagtactacactgcttcttgctg

SEQ ID NO: 38148 - DNA, 25 bp, synthetic construct
  misc_feature 1..25: note = Oligonucleotide
  source 1..25: mol_type = other DNA
gcctccagtactacactgcttcttg

SEQ ID NO: 38149 - DNA, 25 bp, synthetic construct
  misc_feature 1..25: note = Oligonucleotide
  source 1..25: mol_type = other DNA
gaggcctccagtactacactgcttc

SEQ ID NO: 38150 - DNA, 25 bp, synthetic construct
  misc_feature 1..25: note = Oligonucleotide
  source 1..25: mol_type = other DNA
aatgaggcctccagtactacactgc

SEQ ID NO: 38151 - DNA, 25 bp, synthetic construct
  misc_feature 1..25: note = Oligonucleotide
  source 1..25: mol_type = other DNA
gctaatgaggcctccagtactacac

SEQ ID NO: 38152 - DNA, 25 bp, synthetic construct
  misc_feature 1..25: note = Oligonucleotide
  source 1..25: mol_type = other DNA
agtgctaatgaggcctccagtacta

SEQ ID NO: 38153 - DNA, 25 bp, synthetic construct
  misc_feature 1..25: note = Oligonucleotide
  source 1..25: mol_type = other DNA
cgcagtgctaatgaggcctccagta

SEQ ID NO: 38154 - DNA, 25 bp, synthetic construct
  misc_feature 1..25: note = Oligonucleotide
  source 1..25: mol_type = other DNA
caccgcagtgctaatgaggcctcca

SEQ ID NO: 38155 - DNA, 25 bp, synthetic construct
  misc_feature 1..25: note = Oligonucleotide
  source 1..25: mol_type = other DNA
agccaccgcagtgctaatgaggcct

SEQ ID NO: 38156 - DNA, 25 bp, synthetic construct
  misc_feature 1..25: note = Oligonucleotide
  source 1..25: mol_type = other DNA
tccagccaccgcagtgctaatgagg

SEQ ID NO: 38157 - DNA, 25 bp, synthetic construct
  misc_feature 1..25: note = Oligonucleotide
  source 1..25: mol_type = other DNA
tcctccagccaccgcagtgctaatg

SEQ ID NO: 38158 - DNA, 25 bp, synthetic construct
  misc_feature 1..25: note = Oligonucleotide
  source 1..25: mol_type = other DNA
tcctcctccagccaccgcagtgcta

SEQ ID NO: 38159 - DNA, 25 bp, synthetic construct
  misc_feature 1..25: note = Oligonucleotide
  source 1..25: mol_type = other DNA
gcatcctcctccagccaccgcagtg

SEQ ID NO: 38160 - DNA, 25 bp, synthetic construct
  misc_feature 1..25: note = Oligonucleotide
  source 1..25: mol_type = other DNA
atcgcatcctcctccagccaccgca

SEQ ID NO: 38161 - DNA, 25 bp, synthetic construct
  misc_feature 1..25: note = Oligonucleotide
  source 1..25: mol_type = other DNA
ctgatcgcatcctcctccagccacc

SEQ ID NO: 38162 - DNA, 25 bp, synthetic construct
  misc_feature 1..25: note = Oligonucleotide
  source 1..25: mol_type = other DNA
ttcctgatcgcatcctcctccagcc

SEQ ID NO: 38163 - DNA, 25 bp, synthetic construct
  misc_feature 1..25: note = Oligonucleotide
  source 1..25: mol_type = other DNA
ctgttcctgatcgcatcctcctcca

SEQ ID NO: 38164 - DNA, 25 bp, synthetic construct
  misc_feature 1..25: note = Oligonucleotide
  source 1..25: mol_type = other DNA
tgcctgttcctgatcgcatcctcct

SEQ ID NO: 38165 - DNA, 25 bp, synthetic construct
  misc_feature 1..25: note = Oligonucleotide
  source 1..25: mol_type = other DNA
gactgcctgttcctgatcgcatcct

SEQ ID NO: 38166 - DNA, 25 bp, synthetic construct
  misc_feature 1..25: note = Oligonucleotide
  source 1..25: mol_type = other DNA
acagactgcctgttcctgatcgcat

SEQ ID NO: 38167 - DNA, 25 bp, synthetic construct
  misc_feature 1..25: note = Oligonucleotide
  source 1..25: mol_type = other DNA
aatacagactgcctgttcctgatcg

SEQ ID NO: 38168 - DNA, 25 bp, synthetic construct
  misc_feature 1..25: note = Oligonucleotide
  source 1..25: mol_type = other DNA
taaaatacagactgcctgttcctga

SEQ ID NO: 38169 - DNA, 25 bp, synthetic construct
  misc_feature 1..25: note = Oligonucleotide
  source 1..25: mol_type = other DNA
cgctaaaatacagactgcctgttcc

SEQ ID NO: 38170 - DNA, 25 bp, synthetic construct
  misc_feature 1..25: note = Oligonucleotide
  source 1..25: mol_type = other DNA
actcgctaaaatacagactgcctgt

SEQ ID NO: 38171 - DNA, 25 bp, synthetic construct
  misc_feature 1..25: note = Oligonucleotide
  source 1..25: mol_type = other DNA
tgaactcgctaaaatacagactgcc

SEQ ID NO: 38172 - DNA, 25 bp, synthetic construct
  misc_feature 1..25: note = Oligonucleotide
  source 1..25: mol_type = other DNA
ttatgaactcgctaaaatacagact

SEQ ID NO: 38173 - DNA, 25 bp, synthetic construct
  misc_feature 1..25: note = Oligonucleotide
  source 1..25: mol_type = other DNA
tttttatgaactcgctaaaatacag

SEQ ID NO: 38174 - DNA, 25 bp, synthetic construct
  misc_feature 1..25: note = Oligonucleotide
  source 1..25: mol_type = other DNA
acatttttatgaactcgctaaaata

SEQ ID NO: 38175 - DNA, 25 bp, synthetic construct
  misc_feature 1..25: note = Oligonucleotide
  source 1..25: mol_type = other DNA
tcaacatttttatgaactcgctaaa

SEQ ID NO: 38176 - DNA, 25 bp, synthetic construct
  misc_feature 1..25: note = Oligonucleotide
  source 1..25: mol_type = other DNA
tggtcaacatttttatgaactcgct

SEQ ID NO: 38177 - DNA, 25 bp, synthetic construct
  misc_feature 1..25: note = Oligonucleotide
  source 1..25: mol_type = other DNA
gattggtcaacatttttatgaactc

SEQ ID NO: 38178 - DNA, 25 bp, synthetic construct
  misc_feature 1..25: note = Oligonucleotide
  source 1..25: mol_type = other DNA
tgagattggtcaacatttttatgaa

SEQ ID NO: 38179 - DNA, 25 bp, synthetic construct
  misc_feature 1..25: note = Oligonucleotide
  source 1..25: mol_type = other DNA
ctctgagattggtcaacatttttat

SEQ ID NO: 38180 - DNA, 25 bp, synthetic construct
  misc_feature 1..25: note = Oligonucleotide
  source 1..25: mol_type = other DNA
tcactctgagattggtcaacatttt

SEQ ID NO: 38181 - DNA, 25 bp, synthetic construct
  misc_feature 1..25: note = Oligonucleotide
  source 1..25: mol_type = other DNA
gcctcactctgagattggtcaacat

SEQ ID NO: 38182 - DNA, 25 bp, synthetic construct
  misc_feature 1..25: note = Oligonucleotide
  source 1..25: mol_type = other DNA
ccagcctcactctgagattggtcaa

SEQ ID NO: 38183 - DNA, 25 bp, synthetic construct
  misc_feature 1..25: note = Oligonucleotide
  source 1..25: mol_type = other DNA
ttcccagcctcactctgagattggt

SEQ ID NO: 38184 - DNA, 25 bp, synthetic construct
  misc_feature 1..25: note = Oligonucleotide
  source 1..25: mol_type = other DNA
ctgttcccagcctcactctgagatt

SEQ ID NO: 38185 - DNA, 25 bp, synthetic construct
  misc_feature 1..25: note = Oligonucleotide
  source 1..25: mol_type = other DNA
ctcctgttcccagcctcactctgag

SEQ ID NO: 38186 - DNA, 25 bp, synthetic construct
  misc_feature 1..25: note = Oligonucleotide
  source 1..25: mol_type = other DNA
gtgctcctgttcccagcctcactct

SEQ ID NO: 38187 - DNA, 25 bp, synthetic construct
  misc_feature 1..25: note = Oligonucleotide
  source 1..25: mol_type = other DNA
gtggtgctcctgttcccagcctcac

SEQ ID NO: 38188 - DNA, 25 bp, synthetic construct
  misc_feature 1..25: note = Oligonucleotide
  source 1..25: mol_type = other DNA
ctcgtggtgctcctgttcccagcct

SEQ ID NO: 38189 - DNA, 25 bp, synthetic construct
  misc_feature 1..25: note = Oligonucleotide
  source 1..25: mol_type = other DNA
ggtctcgtggtgctcctgttcccag

SEQ ID NO: 38190 - DNA, 25 bp, synthetic construct
  misc_feature 1..25: note = Oligonucleotide
  source 1..25: mol_type = other DNA
ccaggtctcgtggtgctcctgttcc

SEQ ID NO: 38191 - DNA, 25 bp, synthetic construct
  misc_feature 1..25: note = Oligonucleotide
  source 1..25: mol_type = other DNA
cacccaggtctcgtggtgctcctgt

SEQ ID NO: 38192 - DNA, 25 bp, synthetic construct
  misc_feature 1..25: note = Oligonucleotide
  source 1..25: mol_type = other DNA
acacacccaggtctcgtggtgctcc

SEQ ID NO: 38193 - DNA, 25 bp, synthetic construct
  misc_feature 1..25: note = Oligonucleotide
  source 1..25: mol_type = other DNA
cccacacacccaggtctcgtggtgc

SEQ ID NO: 38194 - DNA, 25 bp, synthetic construct
  misc_feature 1..25: note = Oligonucleotide
  source 1..25: mol_type = other DNA
acacccacacacccaggtctcgtgg

SEQ ID NO: 38195 - DNA, 25 bp, synthetic construct
  misc_feature 1..25: note = Oligonucleotide
  source 1..25: mol_type = other DNA
cccacacccacacacccaggtctcg

SEQ ID NO: 38196 - DNA, 25 bp, synthetic construct
  misc_feature 1..25: note = Oligonucleotide
  source 1..25: mol_type = other DNA
ggccccacacccacacacccaggtc

SEQ ID NO: 38197 - DNA, 25 bp, synthetic construct
  misc_feature 1..25: note = Oligonucleotide
  source 1..25: mol_type = other DNA
gacggccccacacccacacacccag

SEQ ID NO: 38198 - DNA, 25 bp, synthetic construct
  misc_feature 1..25: note = Oligonucleotide
  source 1..25: mol_type = other DNA
gcggacggccccacacccacacacc

SEQ ID NO: 38199 - DNA, 25 bp, synthetic construct
  misc_feature 1..25: note = Oligonucleotide
  source 1..25: mol_type = other DNA
ggggcggacggccccacacccacac

SEQ ID NO: 38200 - DNA, 25 bp, synthetic construct
  misc_feature 1..25: note = Oligonucleotide
  source 1..25: mol_type = other DNA
cagggggcggacggccccacaccca

SEQ ID NO: 38201 - DNA, 25 bp, synthetic construct
  misc_feature 1..25: note = Oligonucleotide
  source 1..25: mol_type = other DNA
ctgcagggggcggacggccccacac

SEQ ID NO: 38202 - DNA, 25 bp, synthetic construct
  misc_feature 1..25: note = Oligonucleotide
  source 1..25: mol_type = other DNA
aggctgcagggggcggacggcccca

SEQ ID NO: 38203 - DNA, 25 bp, synthetic construct
  misc_feature 1..25: note = Oligonucleotide
  source 1..25: mol_type = other DNA
gtgaggctgcagggggcggacggcc

SEQ ID NO: 38204 - DNA, 25 bp, synthetic construct
  misc_feature 1..25: note = Oligonucleotide
  source 1..25: mol_type = other DNA
tcagtgaggctgcagggggcggacg

SEQ ID NO: 38205 - DNA, 25 bp, synthetic construct
  misc_feature 1..25: note = Oligonucleotide
  source 1..25: mol_type = other DNA
tgttcagtgaggctgcagggggcgg

SEQ ID NO: 38206 - DNA, 25 bp, synthetic construct
  misc_feature 1..25: note = Oligonucleotide
  source 1..25: mol_type = other DNA
gtgtgttcagtgaggctgcaggggg

SEQ ID NO: 38207 - DNA, 25 bp, synthetic construct
  misc_feature 1..25: note = Oligonucleotide
  source 1..25: mol_type = other DNA
caggtgtgttcagtgaggctgcagg

SEQ ID NO: 38208 - DNA, 25 bp, synthetic construct
  misc_feature 1..25: note = Oligonucleotide
  source 1..25: mol_type = other DNA
ctgcaggtgtgttcagtgaggctgc

SEQ ID NO: 38209 - DNA, 25 bp, synthetic construct
  misc_feature 1..25: note = Oligonucleotide
  source 1..25: mol_type = other DNA
gtgctgcaggtgtgttcagtgaggc

SEQ ID NO: 38210 - DNA, 25 bp, synthetic construct
  misc_feature 1..25: note = Oligonucleotide
  source 1..25: mol_type = other DNA
cacgtgctgcaggtgtgttcagtga

SEQ ID NO: 38211 - DNA, 25 bp, synthetic construct
  misc_feature 1..25: note = Oligonucleotide
  source 1..25: mol_type = other DNA
acacacgtgctgcaggtgtgttcag

SEQ ID NO: 38212 - DNA, 25 bp, synthetic construct
  misc_feature 1..25: note = Oligonucleotide
  source 1..25: mol_type = other DNA
cggacacacgtgctgcaggtgtgtt

SEQ ID NO: 38213 - DNA, 25 bp, synthetic construct
  misc_feature 1..25: note = Oligonucleotide
  source 1..25: mol_type = other DNA
atgcggacacacgtgctgcaggtgt

SEQ ID NO: 38214 - DNA, 25 bp, synthetic construct
  misc_feature 1..25: note = Oligonucleotide
  source 1..25: mol_type = other DNA
atgatgcggacacacgtgctgcagg

SEQ ID NO: 38215 - DNA, 25 bp, synthetic construct
  misc_feature 1..25: note = Oligonucleotide
  source 1..25: mol_type = other DNA
atcatgatgcggacacacgtgctgc

SEQ ID NO: 38216 - DNA, 25 bp, synthetic construct
  misc_feature 1..25: note = Oligonucleotide
  source 1..25: mol_type = other DNA
gacatcatgatgcggacacacgtgc

SEQ ID NO: 38217 - DNA, 25 bp, synthetic construct
  misc_feature 1..25: note = Oligonucleotide
  source 1..25: mol_type = other DNA
gtggacatcatgatgcggacacacg

SEQ ID NO: 38218 - DNA, 25 bp, synthetic construct
  misc_feature 1..25: note = Oligonucleotide
  source 1..25: mol_type = other DNA
cctgtggacatcatgatgcggacac

SEQ ID NO: 38219 - DNA, 25 bp, synthetic construct
  misc_feature 1..25: note = Oligonucleotide
  source 1..25: mol_type = other DNA
acccctgtggacatcatgatgcgga

SEQ ID NO: 38220 - DNA, 25 bp, synthetic construct
  misc_feature 1..25: note = Oligonucleotide
  source 1..25: mol_type = other DNA
aacacccctgtggacatcatgatgc

SEQ ID NO: 38221 - DNA, 25 bp, synthetic construct
  misc_feature 1..25: note = Oligonucleotide
  source 1..25: mol_type = other DNA
ctgaacacccctgtggacatcatga

SEQ ID NO: 38222 - DNA, 25 bp, synthetic construct
  misc_feature 1..25: note = Oligonucleotide
  source 1..25: mol_type = other DNA
ctcctgaacacccctgtggacatca

SEQ ID NO: 38223 - DNA, 25 bp, synthetic construct
  misc_feature 1..25: note = Oligonucleotide
  source 1..25: mol_type = other DNA
aacctcctgaacacccctgtggaca

SEQ ID NO: 38224 - DNA, 25 bp, synthetic construct
  misc_feature 1..25: note = Oligonucleotide
  source 1..25: mol_type = other DNA
cacaacctcctgaacacccctgtgg

SEQ ID NO: 38225 - DNA, 25 bp, synthetic construct
  misc_feature 1..25: note = Oligonucleotide
  source 1..25: mol_type = other DNA
tgacacaacctcctgaacacccctg

SEQ ID NO: 38226 - DNA, 25 bp, synthetic construct
  misc_feature 1..25: note = Oligonucleotide
  source 1..25: mol_type = other DNA
acctgacacaacctcctgaacaccc

SEQ ID NO: 38227 - DNA, 25 bp, synthetic construct
  misc_feature 1..25: note = Oligonucleotide
  source 1..25: mol_type = other DNA
agaacctgacacaacctcctgaaca

SEQ ID NO: 38228 - DNA, 25 bp, synthetic construct
  misc_feature 1..25: note = Oligonucleotide
  source 1..25: mol_type = other DNA
agcagaacctgacacaacctcctga

SEQ ID NO: 38229 - DNA, 25 bp, synthetic construct
  misc_feature 1..25: note = Oligonucleotide
  source 1..25: mol_type = other DNA
tccagcagaacctgacacaacctcc

SEQ ID NO: 38230 - DNA, 25 bp, synthetic construct
  misc_feature 1..25: note = Oligonucleotide
  source 1..25: mol_type = other DNA
ctgtccagcagaacctgacacaacc

SEQ ID NO: 38231 - DNA, 25 bp, synthetic construct
  misc_feature 1..25: note = Oligonucleotide
  source 1..25: mol_type = other DNA
ctgctgtccagcagaacctgacaca

SEQ ID NO: 38232 - DNA, 25 bp, synthetic construct
  misc_feature 1..25: note = Oligonucleotide
  source 1..25: mol_type = other DNA
ctcctgctgtccagcagaacctgac

SEQ ID NO: 38233 - DNA, 25 bp, synthetic construct
  misc_feature 1..25: note = Oligonucleotide
  source 1..25: mol_type = other DNA
atgctcctgctgtccagcagaacct

SEQ ID NO: 38234 - DNA, 25 bp, synthetic construct
  misc_feature 1..25: note = Oligonucleotide
  source 1..25: mol_type = other DNA
ctcatgctcctgctgtccagcagaa

SEQ ID NO: 38235 - DNA, 25 bp, synthetic construct
  misc_feature 1..25: note = Oligonucleotide
  source 1..25: mol_type = other DNA
gccctcatgctcctgctgtccagca

SEQ ID NO: 38236 - DNA, 25 bp, synthetic construct
  misc_feature 1..25: note = Oligonucleotide
  source 1..25: mol_type = other DNA
agggccctcatgctcctgctgtcca

SEQ ID NO: 38237 - DNA, 25 bp, synthetic construct
  misc_feature 1..25: note = Oligonucleotide
  source 1..25: mol_type = other DNA
ctcagggccctcatgctcctgctgt

SEQ ID NO: 38238 - DNA, 25 bp, synthetic construct
  misc_feature 1..25: note = Oligonucleotide
  source 1..25: mol_type = other DNA
gtgctcagggccctcatgctcctgc

SEQ ID NO: 38239 - DNA, 25 bp, synthetic construct
  misc_feature 1..25: note = Oligonucleotide
  source 1..25: mol_type = other DNA
ggagtgctcagggccctcatgctcc

SEQ ID NO: 38240 - DNA, 25 bp, synthetic construct
  misc_feature 1..25: note = Oligonucleotide
  source 1..25: mol_type = other DNA
gctggagtgctcagggccctcatgc

SEQ ID NO: 38241 - DNA, 25 bp, synthetic construct
  misc_feature 1..25: note = Oligonucleotide
  source 1..25: mol_type = other DNA
ggggctggagtgctcagggccctca

SEQ ID NO: 38242 - DNA, 25 bp, synthetic construct
  misc_feature 1..25: note = Oligonucleotide
  source 1..25: mol_type = other DNA
gcaggggctggagtgctcagggccc

SEQ ID NO: 38243 - DNA, 25 bp, synthetic construct
  misc_feature 1..25: note = Oligonucleotide
  source 1..25: mol_type = other DNA
tgtgcaggggctggagtgctcaggg

SEQ ID NO: 38244 - DNA, 25 bp, synthetic construct
  misc_feature 1..25: note = Oligonucleotide
  source 1..25: mol_type = other DNA
tcctgtgcaggggctggagtgctca

SEQ ID NO: 38245 - DNA, 25 bp, synthetic construct
  misc_feature 1..25: note = Oligonucleotide
  source 1..25: mol_type = other DNA
gggtcctgtgcaggggctggagtgc

SEQ ID NO: 38246 - DNA, 25 bp, synthetic construct
  misc_feature 1..25: note = Oligonucleotide
  source 1..25: mol_type = other DNA
ttagggtcctgtgcaggggctggag

SEQ ID NO: 38247 - DNA, 25 bp, synthetic construct
  misc_feature 1..25: note = Oligonucleotide
  source 1..25: mol_type = other DNA
ttgttagggtcctgtgcaggggctg

SEQ ID NO: 38248 - DNA, 25 bp, synthetic construct
  misc_feature 1..25: note = Oligonucleotide
  source 1..25: mol_type = other DNA
tcattgttagggtcctgtgcagggg

SEQ ID NO: 38249 - DNA, 25 bp, synthetic construct
  misc_feature 1..25: note = Oligonucleotide
  source 1..25: mol_type = other DNA
acatcattgttagggtcctgtgcag

SEQ ID NO: 38250 - DNA, 25 bp, synthetic construct
  misc_feature 1..25: note = Oligonucleotide
  source 1..25: mol_type = other DNA
cagacatcattgttagggtcctgtg

SEQ ID NO: 38251 - DNA, 25 bp, synthetic construct
  misc_feature 1..25: note = Oligonucleotide
  source 1..25: mol_type = other DNA
gctcagacatcattgttagggtcct

SEQ ID NO: 38252 - DNA, 25 bp, synthetic construct
  misc_feature 1..25: note = Oligonucleotide
  source 1..25: mol_type = other DNA
cttgctcagacatcattgttagggt

SEQ ID NO: 38253 - DNA, 25 bp, synthetic construct
  misc_feature 1..25: note = Oligonucleotide
  source 1..25: mol_type = other DNA
tgccttgctcagacatcattgttag

SEQ ID NO: 38254 - DNA, 25 bp, synthetic construct
  misc_feature 1..25: note = Oligonucleotide
  source 1..25: mol_type = other DNA
gcatgccttgctcagacatcattgt

SEQ ID NO: 38255 - DNA, 25 bp, synthetic construct
  misc_feature 1..25: note = Oligonucleotide
  source 1..25: mol_type = other DNA
tctgcatgccttgctcagacatcat

SEQ ID NO: 38256 - DNA, 25 bp, synthetic construct
  misc_feature 1..25: note = Oligonucleotide
  source 1..25: mol_type = other DNA
ccctctgcatgccttgctcagacat

SEQ ID NO: 38257 - DNA, 25 bp, synthetic construct
  misc_feature 1..25: note = Oligonucleotide
  source 1..25: mol_type = other DNA
cccccctctgcatgccttgctcaga

SEQ ID NO: 38258 - DNA, 25 bp, synthetic construct
  misc_feature 1..25: note = Oligonucleotide
  source 1..25: mol_type = other DNA
taacccccctctgcatgccttgctc

SEQ ID NO: 38259 - DNA, 25 bp, synthetic construct
  misc_feature 1..25: note = Oligonucleotide
  source 1..25: mol_type = other DNA
cagtaacccccctctgcatgccttg

SEQ ID NO: 38260 - DNA, 25 bp, synthetic construct
  misc_feature 1..25: note = Oligonucleotide
  source 1..25: mol_type = other DNA
cttcagtaacccccctctgcatgcc

SEQ ID NO: 38261 - DNA, 25 bp, synthetic construct
  misc_feature 1..25: note = Oligonucleotide
  source 1..25: mol_type = other DNA
gagcttcagtaacccccctctgcat

SEQ ID NO: 38262 - DNA, 25 bp, synthetic construct
  misc_feature 1..25: note = Oligonucleotide
  source 1..25: mol_type = other DNA
tttgagcttcagtaacccccctctg

SEQ ID NO: 38263 - DNA, 25 bp, synthetic construct
  misc_feature 1..25: note = Oligonucleotide
  source 1..25: mol_type = other DNA
ccctttgagcttcagtaacccccct

SEQ ID NO: 38264 - DNA, 25 bp, synthetic construct
  misc_feature 1..25: note = Oligonucleotide
  source 1..25: mol_type = other DNA
agcccctttgagcttcagtaacccc

SEQ ID NO: 38265 - DNA, 25 bp, synthetic construct
  misc_feature 1..25: note = Oligonucleotide
  source 1..25: mol_type = other DNA
ctgagcccctttgagcttcagtaac

SEQ ID NO: 38266 - DNA, 25 bp, synthetic construct
  misc_feature 1..25: note = Oligonucleotide
  source 1..25: mol_type = other DNA
gccctgagcccctttgagcttcagt

SEQ ID NO: 38267 - DNA, 25 bp, synthetic construct
  misc_feature 1..25: note = Oligonucleotide
  source 1..25: mol_type = other DNA
caggccctgagcccctttgagcttc

SEQ ID NO: 38268 - DNA, 25 bp, synthetic construct
  misc_feature 1..25: note = Oligonucleotide
  source 1..25: mol_type = other DNA
ggccaggccctgagcccctttgagc

SEQ ID NO: 38269 - DNA, 25 bp, synthetic construct
  misc_feature 1..25: note = Oligonucleotide
  source 1..25: mol_type = other DNA
ccaggccaggccctgagcccctttg

SEQ ID NO: 38270 - DNA, 25 bp, synthetic construct
  misc_feature 1..25: note = Oligonucleotide
  source 1..25: mol_type = other DNA
accccaggccaggccctgagcccct

SEQ ID NO: 38271 - DNA, 25 bp, synthetic construct
  misc_feature 1..25: note = Oligonucleotide
  source 1..25: mol_type = other DNA
gtgaccccaggccaggccctgagcc

SEQ ID NO: 38272 - DNA, 25 bp, synthetic construct
  misc_feature 1..25: note = Oligonucleotide
  source 1..25: mol_type = other DNA
agcgtgaccccaggccaggccctga

SEQ ID NO: 38273 - DNA, 25 bp, synthetic construct
  misc_feature 1..25: note = Oligonucleotide
  source 1..25: mol_type = other DNA
ggcagcgtgaccccaggccaggccc

SEQ ID NO: 38274 - DNA, 25 bp, synthetic construct
  misc_feature 1..25: note = Oligonucleotide
  source 1..25: mol_type = other DNA
actggcagcgtgaccccaggccagg

SEQ ID NO: 38275 - DNA, 25 bp, synthetic construct
  misc_feature 1..25: note = Oligonucleotide
  source 1..25: mol_type = other DNA
cctactggcagcgtgaccccaggcc

SEQ ID NO: 38276 - DNA, 25 bp, synthetic construct
  misc_feature 1..25: note = Oligonucleotide
  source 1..25: mol_type = other DNA
acccctactggcagcgtgaccccag

SEQ ID NO: 38277 - DNA, 25 bp, synthetic construct
  misc_feature 1..25: note = Oligonucleotide
  source 1..25: mol_type = other DNA
ttaacccctactggcagcgtgaccc

SEQ ID NO: 38278 - DNA, 25 bp, synthetic construct
  misc_feature 1..25: note = Oligonucleotide
  source 1..25: mol_type = other DNA
attttaacccctactggcagcgtga

SEQ ID NO: 38279 - DNA, 25 bp, synthetic construct
  misc_feature 1..25: note = Oligonucleotide
  source 1..25: mol_type = other DNA
ttcattttaacccctactggcagcg

SEQ ID NO: 38280 - DNA, 25 bp, synthetic construct
  misc_feature 1..25: note = Oligonucleotide
  source 1..25: mol_type = other DNA
tgtttcattttaacccctactggca

SEQ ID NO: 38281 - DNA, 25 bp, synthetic construct
  misc_feature 1..25: note = Oligonucleotide
  source 1..25: mol_type = other DNA
gcatgtttcattttaacccctactg

SEQ ID NO: 38282 - DNA, 25 bp, synthetic construct
  misc_feature 1..25: note = Oligonucleotide
  source 1..25: mol_type = other DNA
ccagcatgtttcattttaaccccta

SEQ ID NO: 38283 - DNA, 25 bp, synthetic construct
  misc_feature 1..25: note = Oligonucleotide
  source 1..25: mol_type = other DNA
cacccagcatgtttcattttaaccc

SEQ ID NO: 38284 - DNA, 25 bp, synthetic construct
  misc_feature 1..25: note = Oligonucleotide
  source 1..25: mol_type = other DNA
gagcacccagcatgtttcattttaa

SEQ ID NO: 38285 - DNA, 25 bp, synthetic construct
  misc_feature 1..25: note = Oligonucleotide
  source 1..25: mol_type = other DNA
gctgagcacccagcatgtttcattt

SEQ ID NO: 38286 - DNA, 25 bp, synthetic construct
  misc_feature 1..25: note = Oligonucleotide
  source 1..25: mol_type = other DNA
caggctgagcacccagcatgtttca

SEQ ID NO: 38287 - DNA, 25 bp, synthetic construct
  misc_feature 1..25: note = Oligonucleotide
  source 1..25: mol_type = other DNA
ctgcaggctgagcacccagcatgtt

SEQ ID NO: 38288 - DNA, 25 bp, synthetic construct
  misc_feature 1..25: note = Oligonucleotide
  source 1..25: mol_type = other DNA
gaactgcaggctgagcacccagcat

SEQ ID NO: 38289 - DNA, 25 bp, synthetic construct
  misc_feature 1..25: note = Oligonucleotide
  source 1..25: mol_type = other DNA
atggaactgcaggctgagcacccag

SEQ ID NO: 38290 - DNA, 25 bp, synthetic construct
  misc_feature 1..25: note = Oligonucleotide
  source 1..25: mol_type = other DNA
aaaatggaactgcaggctgagcacc

SEQ ID NO: 38291 - DNA, 25 bp, synthetic construct
  misc_feature 1..25: note = Oligonucleotide
  source 1..25: mol_type = other DNA
atcaaaatggaactgcaggctgagc

SEQ ID NO: 38292 - DNA, 25 bp, synthetic construct
  misc_feature 1..25: note = Oligonucleotide
  source 1..25: mol_type = other DNA
tcaatcaaaatggaactgcaggctg

SEQ ID NO: 38293 - DNA, 25 bp, synthetic construct
  misc_feature 1..25: note = Oligonucleotide
  source 1..25: mol_type = other DNA
ggatcaatcaaaatggaactgcagg

SEQ ID NO: 38294 - DNA, 25 bp, synthetic construct
  misc_feature 1..25: note = Oligonucleotide
  source 1..25: mol_type = other DNA
gacggatcaatcaaaatggaactgc

SEQ ID NO: 38295 - DNA, 25 bp, synthetic construct
  misc_feature 1..25: note = Oligonucleotide
  source 1..25: mol_type = other DNA
acggacggatcaatcaaaatggaac

SEQ ID NO: 38296 - DNA, 25 bp, synthetic construct
  misc_feature 1..25: note = Oligonucleotide
  source 1..25: mol_type = other DNA
agaacggacggatcaatcaaaatgg

SEQ ID NO: 38297 - DNA, 25 bp, synthetic construct
  misc_feature 1..25: note = Oligonucleotide
  source 1..25: mol_type = other DNA
ggaagaacggacggatcaatcaaaa

SEQ ID NO: 38298 - DNA, 25 bp, synthetic construct
  misc_feature 1..25: note = Oligonucleotide
  source 1..25: mol_type = other DNA
aagggaagaacggacggatcaatca

SEQ ID NO: 38299 - DNA, 25 bp, synthetic construct
  misc_feature 1..25: note = Oligonucleotide
  source 1..25: mol_type = other DNA
gtgaagggaagaacggacggatcaa

SEQ ID NO: 38300 - DNA, 25 bp, synthetic construct
  misc_feature 1..25: note = Oligonucleotide
  source 1..25: mol_type = other DNA
tgggtgaagggaagaacggacggat

SEQ ID NO: 38301 - DNA, 25 bp, synthetic construct
  misc_feature 1..25: note = Oligonucleotide
  source 1..25: mol_type = other DNA
gagtgggtgaagggaagaacggacg

SEQ ID NO: 38302 - DNA, 25 bp, synthetic construct
  misc_feature 1..25: note = Oligonucleotide
  source 1..25: mol_type = other DNA
ggtgagtgggtgaagggaagaacgg

SEQ ID NO: 38303 - DNA, 25 bp, synthetic construct
  misc_feature 1..25: note = Oligonucleotide
  source 1..25: mol_type = other DNA
atgggtgagtgggtgaagggaagaa

SEQ ID NO: 38304 - DNA, 25 bp, synthetic construct
  misc_feature 1..25: note = Oligonucleotide
  source 1..25: mol_type = other DNA
cgcatgggtgagtgggtgaagggaa

SEQ ID NO: 38305 - DNA, 25 bp, synthetic construct
  misc_feature 1..25: note = Oligonucleotide
  source 1..25: mol_type = other DNA
acccgcatgggtgagtgggtgaagg

SEQ ID NO: 38306 - DNA, 25 bp, synthetic construct
  misc_feature 1..25: note = Oligonucleotide
  source 1..25: mol_type = other DNA
gagacccgcatgggtgagtgggtga

SEQ ID NO: 38307 - DNA, 25 bp, synthetic construct
  misc_feature 1..25: note = Oligonucleotide
  source 1..25: mol_type = other DNA
ccagagacccgcatgggtgagtggg

SEQ ID NO: 38308 - DNA, 25 bp, synthetic construct
  misc_feature 1..25: note = Oligonucleotide
  source 1..25: mol_type = other DNA
ctcccagagacccgcatgggtgagt

SEQ ID NO: 38309 - DNA, 25 bp, synthetic construct
  misc_feature 1..25: note = Oligonucleotide
  source 1..25: mol_type = other DNA
ctcctcccagagacccgcatgggtg

SEQ ID NO: 38310 - DNA, 25 bp, synthetic construct
  misc_feature 1..25: note = Oligonucleotide
  source 1..25: mol_type = other DNA
aggctcctcccagagacccgcatgg

SEQ ID NO: 38311 - DNA, 25 bp, synthetic construct
  misc_feature 1..25: note = Oligonucleotide
  source 1..25: mol_type = other DNA
gagaggctcctcccagagacccgca

SEQ ID NO: 38312 - DNA, 25 bp, synthetic construct
  misc_feature 1..25: note = Oligonucleotide
  source 1..25: mol_type = other DNA
cttgagaggctcctcccagagaccc

SEQ ID NO: 38313 - DNA, 25 bp, synthetic construct
  misc_feature 1..25: note = Oligonucleotide
  source 1..25: mol_type = other DNA
agccttgagaggctcctcccagaga

SEQ ID NO: 38314 - DNA, 25 bp, synthetic construct
  misc_feature 1..25: note = Oligonucleotide
  source 1..25: mol_type = other DNA
ggaagccttgagaggctcctcccag

SEQ ID NO: 38315 - DNA, 25 bp, synthetic construct
  misc_feature 1..25: note = Oligonucleotide
  source 1..25: mol_type = other DNA
ggaggaagccttgagaggctcctcc

SEQ ID NO: 38316 - DNA, 25 bp, synthetic construct
  misc_feature 1..25: note = Oligonucleotide
  source 1..25: mol_type = other DNA
tgtggaggaagccttgagaggctcc

SEQ ID NO: 38317 - DNA, 25 bp, synthetic construct
  misc_feature 1..25: note = Oligonucleotide
  source 1..25: mol_type = other DNA
ccctgtggaggaagccttgagaggc

SEQ ID NO: 38318 - DNA, 25 bp, synthetic construct
  misc_feature 1..25: note = Oligonucleotide
  source 1..25: mol_type = other DNA
gtgccctgtggaggaagccttgaga

SEQ ID NO: 38319 - DNA, 25 bp, synthetic construct
  misc_feature 1..25: note = Oligonucleotide
  source 1..25: mol_type = other DNA
gaggtgccctgtggaggaagccttg

SEQ ID NO: 38320 - DNA, 25 bp, synthetic construct
  misc_feature 1..25: note = Oligonucleotide
  source 1..25: mol_type = other DNA
aaggaggtgccctgtggaggaagcc

SEQ ID NO: 38321 - DNA, 25 bp, synthetic construct
  misc_feature 1..25: note = Oligonucleotide
  source 1..25: mol_type = other DNA
ggtaaggaggtgccctgtggaggaa

SEQ ID NO: 38322 - DNA, 25 bp, synthetic construct
  misc_feature 1..25: note = Oligonucleotide
  source 1..25: mol_type = other DNA
ccaggtaaggaggtgccctgtggag

SEQ ID NO: 38323 - DNA, 25 bp, synthetic construct
  misc_feature 1..25: note = Oligonucleotide
  source 1..25: mol_type = other DNA
cacccaggtaaggaggtgccctgtg

SEQ ID NO: 38324 - DNA, 25 bp, synthetic construct
  misc_feature 1..25: note = Oligonucleotide
  source 1..25: mol_type = other DNA
gcccacccaggtaaggaggtgccct

SEQ ID NO: 38325 - DNA, 25 bp, synthetic construct
  misc_feature 1..25: note = Oligonucleotide
  source 1..25: mol_type = other DNA
aatgcccacccaggtaaggaggtgc

SEQ ID NO: 38326 - DNA, 25 bp, synthetic construct
  misc_feature 1..25: note = Oligonucleotide
  source 1..25: mol_type = other DNA
cctaatgcccacccaggtaaggagg

SEQ ID NO: 38327 - DNA, 25 bp, synthetic construct
  misc_feature 1..25: note = Oligonucleotide
  source 1..25: mol_type = other DNA
agacctaatgcccacccaggtaagg

SEQ ID NO: 38328 - DNA, 25 bp, synthetic construct
  misc_feature 1..25: note = Oligonucleotide
  source 1..25: mol_type = other DNA
gaaagacctaatgcccacccaggta

SEQ ID NO: 38329 - DNA, 25 bp, synthetic construct
  misc_feature 1..25: note = Oligonucleotide
  source 1..25: mol_type = other DNA
agagaaagacctaatgcccacccag

SEQ ID NO: 38330 - DNA, 25 bp, synthetic construct
  misc_feature 1..25: note = Oligonucleotide
  source 1..25: mol_type = other DNA
agcagagaaagacctaatgcccacc

SEQ ID NO: 38331 - DNA, 25 bp, synthetic construct
  misc_feature 1..25: note = Oligonucleotide
  source 1..25: mol_type = other DNA
tccagcagagaaagacctaatgccc

SEQ ID NO: 38332 - DNA, 25 bp, synthetic construct
  misc_feature 1..25: note = Oligonucleotide
  source 1..25: mol_type = other DNA
gcctccagcagagaaagacctaatg

SEQ ID NO: 38333 - DNA, 25 bp, synthetic construct
  misc_feature 1..25: note = Oligonucleotide
  source 1..25: mol_type = other DNA
caggcctccagcagagaaagaccta

SEQ ID NO: 38334 - DNA, 25 bp, synthetic construct
  misc_feature 1..25: note = Oligonucleotide
  source 1..25: mol_type = other DNA
agccaggcctccagcagagaaagac

SEQ ID NO: 38335 - DNA, 25 bp, synthetic construct
  misc_feature 1..25: note = Oligonucleotide
  source 1..25: mol_type = other DNA
tggagccaggcctccagcagagaaa

SEQ ID NO: 38336 - DNA, 25 bp, synthetic construct
  misc_feature 1..25: note = Oligonucleotide
  source 1..25: mol_type = other DNA
cactggagccaggcctccagcagag

SEQ ID NO: 38337 - DNA, 25 bp, synthetic construct
  misc_feature 1..25: note = Oligonucleotide
  source 1..25: mol_type = other DNA
ggccactggagccaggcctccagca

SEQ ID NO: 38338 - DNA, 25 bp, synthetic construct
  misc_feature 1..25: note = Oligonucleotide
  source 1..25: mol_type = other DNA
tgtggccactggagccaggcctcca

SEQ ID NO: 38339 - DNA, 25 bp, synthetic construct
  misc_feature 1..25: note = Oligonucleotide
  source 1..25: mol_type = other DNA
ggctgtggccactggagccaggcct

SEQ ID NO: 38340 - DNA, 25 bp, synthetic construct
  misc_feature 1..25: note = Oligonucleotide
  source 1..25: mol_type = other DNA
cagggctgtggccactggagccagg

SEQ ID NO: 38341 - DNA, 25 bp, synthetic construct
  misc_feature 1..25: note = Oligonucleotide
  source 1..25: mol_type = other DNA
cagcagggctgtggccactggagcc

SEQ ID NO: 38342 - DNA, 25 bp, synthetic construct
  misc_feature 1..25: note = Oligonucleotide
  source 1..25: mol_type = other DNA
gggcagcagggctgtggccactgga

SEQ ID NO: 38343 - DNA, 25 bp, synthetic construct
  misc_feature 1..25: note = Oligonucleotide
  source 1..25: mol_type = other DNA
gaggggcagcagggctgtggccact

SEQ ID NO: 38344 - DNA, 25 bp, synthetic construct
  misc_feature 1..25: note = Oligonucleotide
  source 1..25: mol_type = other DNA
ggtgaggggcagcagggctgtggcc

SEQ ID NO: 38345 - DNA, 25 bp, synthetic construct
  misc_feature 1..25: note = Oligonucleotide
  source 1..25: mol_type = other DNA
cagggtgaggggcagcagggctgtg

SEQ ID NO: 38346 - DNA, 25 bp, synthetic construct
  misc_feature 1..25: note = Oligonucleotide
  source 1..25: mol_type = other DNA
tggcagggtgaggggcagcagggct

SEQ ID NO: 38347 - DNA, 25 bp, synthetic construct
  misc_feature 1..25: note = Oligonucleotide
  source 1..25: mol_type = other DNA
cactggcagggtgaggggcagcagg

SEQ ID NO: 38348 - DNA, 25 bp, synthetic construct
  misc_feature 1..25: note = Oligonucleotide
  source 1..25: mol_type = other DNA
acacactggcagggtgaggggcagc

SEQ ID NO: 38349 - DNA, 25 bp, synthetic construct
  misc_feature 1..25: note = Oligonucleotide
  source 1..25: mol_type = other DNA
gtgacacactggcagggtgaggggc

SEQ ID NO: 38350 - DNA, 25 bp, synthetic construct
  misc_feature 1..25: note = Oligonucleotide
  source 1..25: mol_type = other DNA
ggagtgacacactggcagggtgagg

SEQ ID NO: 38351 - DNA, 25 bp, synthetic construct
  misc_feature 1..25: note = Oligonucleotide
  source 1..25: mol_type = other DNA
gcaggagtgacacactggcagggtg

SEQ ID NO: 38352 - DNA, 25 bp, synthetic construct
  misc_feature 1..25: note = Oligonucleotide
  source 1..25: mol_type = other DNA
tgagcaggagtgacacactggcagg

SEQ ID NO: 38353 - DNA, 25 bp, synthetic construct
  misc_feature 1..25: note = Oligonucleotide
  source 1..25: mol_type = other DNA
aaatgagcaggagtgacacactggc

SEQ ID NO: 38354 - DNA, 25 bp, synthetic construct
  misc_feature 1..25: note = Oligonucleotide
  source 1..25: mol_type = other DNA
cggaaatgagcaggagtgacacact

SEQ ID NO: 38355 - DNA, 25 bp, synthetic construct
  misc_feature 1..25: note = Oligonucleotide
  source 1..25: mol_type = other DNA
agtcggaaatgagcaggagtgacac

SEQ ID NO: 38356 - DNA, 25 bp, synthetic construct
  misc_feature 1..25: note = Oligonucleotide
  source 1..25: mol_type = other DNA
gatagtcggaaatgagcaggagtga

SEQ ID NO: 38357 - DNA, 25 bp, synthetic construct
  misc_feature 1..25: note = Oligonucleotide
  source 1..25: mol_type = other DNA
gaagatagtcggaaatgagcaggag

SEQ ID NO: 38358 - DNA, 25 bp, synthetic construct
  misc_feature 1..25: note = Oligonucleotide
  source 1..25: mol_type = other DNA
gaggaagatagtcggaaatgagcag

SEQ ID NO: 38359 - DNA, 25 bp, synthetic construct
  misc_feature 1..25: note = Oligonucleotide
  source 1..25: mol_type = other DNA
tgagaggaagatagtcggaaatgag

SEQ ID NO: 38360 - DNA, 25 bp, synthetic construct
  misc_feature 1..25: note = Oligonucleotide
  source 1..25: mol_type = other DNA
aggtgagaggaagatagtcggaaat

SEQ ID NO: 38361 - DNA, 25 bp, synthetic construct
  misc_feature 1..25: note = Oligonucleotide
  source 1..25: mol_type = other DNA
cagaggtgagaggaagatagtcgga

SEQ ID NO: 38362 - DNA, 25 bp, synthetic construct
  misc_feature 1..25: note = Oligonucleotide
  source 1..25: mol_type = other DNA
aaccagaggtgagaggaagatagtc

SEQ ID NO: 38363 - DNA, 25 bp, synthetic construct
  misc_feature 1..25: note = Oligonucleotide
  source 1..25: mol_type = other DNA
ggcaaccagaggtgagaggaagata

SEQ ID NO: 38364 - DNA, 25 bp, synthetic construct
  misc_feature 1..25: note = Oligonucleotide
  source 1..25: mol_type = other DNA
ggaggcaaccagaggtgagaggaag

SEQ ID NO: 38365 - DNA, 25 bp, synthetic construct
  misc_feature 1..25: note = Oligonucleotide
  source 1..25: mol_type = other DNA
cctggaggcaaccagaggtgagagg

SEQ ID NO: 38366 - DNA, 25 bp, synthetic construct
  misc_feature 1..25: note = Oligonucleotide
  source 1..25: mol_type = other DNA
agccctggaggcaaccagaggtgag

SEQ ID NO: 38367 - DNA, 25 bp, synthetic construct
  misc_feature 1..25: note = Oligonucleotide
  source 1..25: mol_type = other DNA
accagccctggaggcaaccagaggt

SEQ ID NO: 38368 - DNA, 25 bp, synthetic construct
  misc_feature 1..25: note = Oligonucleotide
  source 1..25: mol_type = other DNA
agtaccagccctggaggcaaccaga

SEQ ID NO: 38369 - DNA, 25 bp, synthetic construct
  misc_feature 1..25: note = Oligonucleotide
  source 1..25: mol_type = other DNA
agaagtaccagccctggaggcaacc

SEQ ID NO: 38370 - DNA, 25 bp, synthetic construct
  misc_feature 1..25: note = Oligonucleotide
  source 1..25: mol_type = other DNA
cgcagaagtaccagccctggaggca

SEQ ID NO: 38371 - DNA, 25 bp, synthetic construct
  misc_feature 1..25: note = Oligonucleotide
  source 1..25: mol_type = other DNA
cgacgcagaagtaccagccctggag

SEQ ID NO: 38372 - DNA, 25 bp, synthetic construct
  misc_feature 1..25: note = Oligonucleotide
  source 1..25: mol_type = other DNA
ggccgacgcagaagtaccagccctg

SEQ ID NO: 38373 - DNA, 25 bp, synthetic construct
  misc_feature 1..25: note = Oligonucleotide
  source 1..25: mol_type = other DNA
caaggccgacgcagaagtaccagcc

SEQ ID NO: 38374 - DNA, 25 bp, synthetic construct
  misc_feature 1..25: note = Oligonucleotide
  source 1..25: mol_type = other DNA
caacaaggccgacgcagaagtacca

SEQ ID NO: 38375 - DNA, 25 bp, synthetic construct
  misc_feature 1..25: note = Oligonucleotide
  source 1..25: mol_type = other DNA
aatcaacaaggccgacgcagaagta

SEQ ID NO: 38376 - DNA, 25 bp, synthetic construct
  misc_feature 1..25: note = Oligonucleotide
  source 1..25: mol_type = other DNA
cagaatcaacaaggccgacgcagaa

SEQ ID NO: 38377 - DNA, 25 bp, synthetic construct
  misc_feature 1..25: note = Oligonucleotide
  source 1..25: mol_type = other DNA
ccccagaatcaacaaggccgacgca

SEQ ID NO: 38378 - DNA, 25 bp, synthetic construct
  misc_feature 1..25: note = Oligonucleotide
  source 1..25: mol_type = other DNA
ccaccccagaatcaacaaggccgac

SEQ ID NO: 38379 - DNA, 25 bp, synthetic construct
  misc_feature 1..25: note = Oligonucleotide
  source 1..25: mol_type = other DNA
tccccaccccagaatcaacaaggcc

SEQ ID NO: 38380 - DNA, 25 bp, synthetic construct
  misc_feature 1..25: note = Oligonucleotide
  source 1..25: mol_type = other DNA
ggctccccaccccagaatcaacaag

SEQ ID NO: 38381 - DNA, 25 bp, synthetic construct
  misc_feature 1..25: note = Oligonucleotide
  source 1..25: mol_type = other DNA
cagggctccccaccccagaatcaac

SEQ ID NO: 38382 - DNA, 25 bp, synthetic construct
  misc_feature 1..25: note = Oligonucleotide
  source 1..25: mol_type = other DNA
gtacagggctccccaccccagaatc

SEQ ID NO: 38383 - DNA, 25 bp, synthetic construct
  misc_feature 1..25: note = Oligonucleotide
  source 1..25: mol_type = other DNA
ccagtacagggctccccaccccaga

SEQ ID NO: 38384 - DNA, 25 bp, synthetic construct
  misc_feature 1..25: note = Oligonucleotide
  source 1..25: mol_type = other DNA
gggccagtacagggctccccacccc

SEQ ID NO: 38385 - DNA, 25 bp, synthetic construct
  misc_feature 1..25: note = Oligonucleotide
  source 1..25: mol_type = other DNA
gaggggccagtacagggctccccac

SEQ ID NO: 38386 - DNA, 25 bp, synthetic construct
  misc_feature 1..25: note = Oligonucleotide
  source 1..25: mol_type = other DNA
ttggaggggccagtacagggctccc

SEQ ID NO: 38387 - DNA, 25 bp, synthetic construct
  misc_feature 1..25: note = Oligonucleotide
  source 1..25: mol_type = other DNA
ggcttggaggggccagtacagggct

SEQ ID NO: 38388 - DNA, 25 bp, synthetic construct
  misc_feature 1..25: note = Oligonucleotide
  source 1..25: mol_type = other DNA
aggggcttggaggggccagtacagg

SEQ ID NO: 38389 - DNA, 25 bp, synthetic construct
  misc_feature 1..25: note = Oligonucleotide
  source 1..25: mol_type = other DNA
ctgaggggcttggaggggccagtac

SEQ ID NO: 38390 - DNA, 25 bp, synthetic construct
  misc_feature 1..25: note = Oligonucleotide
  source 1..25: mol_type = other DNA
ctgctgaggggcttggaggggccag

SEQ ID NO: 38391 - DNA, 25 bp, synthetic construct
  misc_feature 1..25: note = Oligonucleotide
  source 1..25: mol_type = other DNA
gaactgctgaggggcttggaggggc

SEQ ID NO: 38392 - DNA, 25 bp, synthetic construct
  misc_feature 1..25: note = Oligonucleotide
  source 1..25: mol_type = other DNA
acagaactgctgaggggcttggagg

SEQ ID NO: 38393 - DNA, 25 bp, synthetic construct
  misc_feature 1..25: note = Oligonucleotide
  source 1..25: mol_type = other DNA
gggacagaactgctgaggggcttgg

SEQ ID NO: 38394 - DNA, 25 bp, synthetic construct
  misc_feature 1..25: note = Oligonucleotide
  source 1..25: mol_type = other DNA
atggggacagaactgctgaggggct

SEQ ID NO: 38395 - DNA, 25 bp, synthetic construct
  misc_feature 1..25: note = Oligonucleotide
  source 1..25: mol_type = other DNA
gacatggggacagaactgctgaggg

SEQ ID NO: 38396 - DNA, 25 bp, synthetic construct
  misc_feature 1..25: note = Oligonucleotide
  source 1..25: mol_type = other DNA
caagacatggggacagaactgctga

SEQ ID NO: 38397 - DNA, 25 bp, synthetic construct
  misc_feature 1..25: note = Oligonucleotide
  source 1..25: mol_type = other DNA
ccgcaagacatggggacagaactgc

SEQ ID NO: 38398 - DNA, 25 bp, synthetic construct
  misc_feature 1..25: note = Oligonucleotide
  source 1..25: mol_type = other DNA
gccccgcaagacatggggacagaac

SEQ ID NO: 38399 - DNA, 25 bp, synthetic construct
  misc_feature 1..25: note = Oligonucleotide
  source 1..25: mol_type = other DNA
acagccccgcaagacatggggacag

SEQ ID NO: 38400 - DNA, 25 bp, synthetic construct
  misc_feature 1..25: note = Oligonucleotide
  source 1..25: mol_type = other DNA
gggacagccccgcaagacatgggga

SEQ ID NO: 38401 - DNA, 25 bp, synthetic construct
  misc_feature 1..25: note = Oligonucleotide
  source 1..25: mol_type = other DNA
gcagggacagccccgcaagacatgg

SEQ ID NO: 38402 - DNA, 25 bp, synthetic construct
  misc_feature 1..25: note = Oligonucleotide
  source 1..25: mol_type = other DNA
aaggcagggacagccccgcaagaca

SEQ ID NO: 38403 - DNA, 25 bp, synthetic construct
  misc_feature 1..25: note = Oligonucleotide
  source 1..25: mol_type = other DNA
agaaaggcagggacagccccgcaag

SEQ ID NO: 38404 - DNA, 25 bp, synthetic construct
  misc_feature 1..25: note = Oligonucleotide
  source 1..25: mol_type = other DNA
cccagaaaggcagggacagccccgc

SEQ ID NO: 38405 - DNA, 25 bp, synthetic construct
  misc_feature 1..25: note = Oligonucleotide
  source 1..25: mol_type = other DNA
tatcccagaaaggcagggacagccc

SEQ ID NO: 38406 - DNA, 25 bp, synthetic construct
  misc_feature 1..25: note = Oligonucleotide
  source 1..25: mol_type = other DNA
agatatcccagaaaggcagggacag

SEQ ID NO: 38407 - DNA, 25 bp, synthetic construct
  misc_feature 1..25: note = Oligonucleotide
  source 1..25: mol_type = other DNA
agaagatatcccagaaaggcaggga

SEQ ID NO: 38408 - DNA, 25 bp, synthetic construct
  misc_feature 1..25: note = Oligonucleotide
  source 1..25: mol_type = other DNA
ctgagaagatatcccagaaaggcag

SEQ ID NO: 38409 - DNA, 25 bp, synthetic construct
  misc_feature 1..25: note = Oligonucleotide
  source 1..25: mol_type = other DNA
gccctgagaagatatcccagaaagg

SEQ ID NO: 38410 - DNA, 25 bp, synthetic construct
  misc_feature 1..25: note = Oligonucleotide
  source 1..25: mol_type = other DNA
caggccctgagaagatatcccagaa

SEQ ID NO: 38411 - DNA, 25 bp, synthetic construct
  misc_feature 1..25: note = Oligonucleotide
  source 1..25: mol_type = other DNA
aagcaggccctgagaagatatccca

SEQ ID NO: 38412 - DNA, 25 bp, synthetic construct
  misc_feature 1..25: note = Oligonucleotide
  source 1..25: mol_type = other DNA
atcaagcaggccctgagaagatatc

SEQ ID NO: 38413 - DNA, 25 bp, synthetic construct
  misc_feature 1..25: note = Oligonucleotide
  source 1..25: mol_type = other DNA
gtcatcaagcaggccctgagaagat

SEQ ID NO: 38414 - DNA, 25 bp, synthetic construct
  misc_feature 1..25: note = Oligonucleotide
  source 1..25: mol_type = other DNA
agggtcatcaagcaggccctgagaa

SEQ ID NO: 38415 - DNA, 25 bp, synthetic construct
  misc_feature 1..25: note = Oligonucleotide
  source 1..25: mol_type = other DNA
cccagggtcatcaagcaggccctga

SEQ ID NO: 38416 - DNA, 25 bp, synthetic construct
  misc_feature 1..25: note = Oligonucleotide
  source 1..25: mol_type = other DNA
aaacccagggtcatcaagcaggccc

SEQ ID NO: 38417 - DNA, 25 bp, synthetic construct
  misc_feature 1..25: note = Oligonucleotide
  source 1..25: mol_type = other DNA
cccaaacccagggtcatcaagcagg

SEQ ID NO: 38418 - DNA, 25 bp, synthetic construct
  misc_feature 1..25: note = Oligonucleotide
  source 1..25: mol_type = other DNA
ctgcccaaacccagggtcatcaagc

SEQ ID NO: 38419 - DNA, 25 bp, synthetic construct
  misc_feature 1..25: note = Oligonucleotide
  source 1..25: mol_type = other DNA
gacctgcccaaacccagggtcatca

SEQ ID NO: 38420 - DNA, 25 bp, synthetic construct
  misc_feature 1..25: note = Oligonucleotide
  source 1..25: mol_type = other DNA
caagacctgcccaaacccagggtca

SEQ ID NO: 38421 - DNA, 25 bp, synthetic construct
  misc_feature 1..25: note = Oligonucleotide
  source 1..25: mol_type = other DNA
ggccaagacctgcccaaacccaggg

SEQ ID NO: 38422 - DNA, 25 bp, synthetic construct
  misc_feature 1..25: note = Oligonucleotide
  source 1..25: mol_type = other DNA
tggggccaagacctgcccaaaccca

SEQ ID NO: 38423 - DNA, 25 bp, synthetic construct
  misc_feature 1..25: note = Oligonucleotide
  source 1..25: mol_type = other DNA
ggttggggccaagacctgcccaaac

SEQ ID NO: 38424 - DNA, 25 bp, synthetic construct
  misc_feature 1..25: note = Oligonucleotide
  source 1..25: mol_type = other DNA
ctgggttggggccaagacctgccca

SEQ ID NO: 38425 - DNA, 25 bp, synthetic construct
  misc_feature 1..25: note = Oligonucleotide
  source 1..25: mol_type = other DNA
ggcctgggttggggccaagacctgc

SEQ ID NO: 38426 - DNA, 25 bp, synthetic construct
  misc_feature 1..25: note = Oligonucleotide
  source 1..25: mol_type = other DNA
gacggcctgggttggggccaagacc

SEQ ID NO: 38427 - DNA, 25 bp, synthetic construct
  misc_feature 1..25: note = Oligonucleotide
  source 1..25: mol_type = other DNA
tctgacggcctgggttggggccaag

SEQ ID NO: 38428 - DNA, 25 bp, synthetic construct
  misc_feature 1..25: note = Oligonucleotide
  source 1..25: mol_type = other DNA
aactctgacggcctgggttggggcc

SEQ ID NO: 38429 - DNA, 25 bp, synthetic construct
  misc_feature 1..25: note = Oligonucleotide
  source 1..25: mol_type = other DNA
acaaactctgacggcctgggttggg

SEQ ID NO: 38430 - DNA, 25 bp, synthetic construct
  misc_feature 1..25: note = Oligonucleotide
  source 1..25: mol_type = other DNA
gacacaaactctgacggcctgggtt

SEQ ID NO: 38431 - DNA, 25 bp, synthetic construct
  misc_feature 1..25: note = Oligonucleotide
  source 1..25: mol_type = other DNA
aaggacacaaactctgacggcctgg

SEQ ID NO: 38432 - DNA, 25 bp, synthetic construct
  misc_feature 1..25: note = Oligonucleotide
  source 1..25: mol_type = other DNA
agaaaggacacaaactctgacggcc

SEQ ID NO: 38433 - DNA, 25 bp, synthetic construct
  misc_feature 1..25: note = Oligonucleotide
  source 1..25: mol_type = other DNA
ctgagaaaggacacaaactctgacg

SEQ ID NO: 38434 - DNA, 25 bp, synthetic construct
  misc_feature 1..25: note = Oligonucleotide
  source 1..25: mol_type = other DNA
cccctgagaaaggacacaaactctg

SEQ ID NO: 38435 - DNA, 25 bp, synthetic construct
  misc_feature 1..25: note = Oligonucleotide
  source 1..25: mol_type = other DNA
ggacccctgagaaaggacacaaact

SEQ ID NO: 38436 - DNA, 25 bp, synthetic construct
  misc_feature 1..25: note = Oligonucleotide
  source 1..25: mol_type = other DNA
cggggacccctgagaaaggacacaa

SEQ ID NO: 38437 - DNA, 25 bp, synthetic construct
  misc_feature 1..25: note = Oligonucleotide
  source 1..25: mol_type = other DNA
caccggggacccctgagaaaggaca

SEQ ID NO: 38438 - DNA, 25 bp, synthetic construct
  misc_feature 1..25: note = Oligonucleotide
  source 1..25: mol_type = other DNA
ccccaccggggacccctgagaaagg

SEQ ID NO: 38439 - DNA, 25 bp, synthetic construct
  misc_feature 1..25: note = Oligonucleotide
  source 1..25: mol_type = other DNA
gggccccaccggggacccctgagaa

SEQ ID NO: 38440 - DNA, 25 bp, synthetic construct
  misc_feature 1..25: note = Oligonucleotide
  source 1..25: mol_type = other DNA
ggagggccccaccggggacccctga

SEQ ID NO: 38441 - DNA, 25 bp, synthetic construct
  misc_feature 1..25: note = Oligonucleotide
  source 1..25: mol_type = other DNA
ggaggagggccccaccggggacccc

SEQ ID NO: 38442 - DNA, 25 bp, synthetic construct
  misc_feature 1..25: note = Oligonucleotide
  source 1..25: mol_type = other DNA
gatggaggagggccccaccggggac

SEQ ID NO: 38443 - DNA, 25 bp, synthetic construct
  misc_feature 1..25: note = Oligonucleotide
  source 1..25: mol_type = other DNA
caggatggaggagggccccaccggg

SEQ ID NO: 38444 - DNA, 25 bp, synthetic construct
  misc_feature 1..25: note = Oligonucleotide
  source 1..25: mol_type = other DNA
ttacaggatggaggagggccccacc

SEQ ID NO: 38445 - DNA, 25 bp, synthetic construct
  misc_feature 1..25: note = Oligonucleotide
  source 1..25: mol_type = other DNA
cagttacaggatggaggagggcccc

SEQ ID NO: 38446 - DNA, 25 bp, synthetic construct
  misc_feature 1..25: note = Oligonucleotide
  source 1..25: mol_type = other DNA
gttcagttacaggatggaggagggc

SEQ ID NO: 38447 - DNA, 25 bp, synthetic construct
  misc_feature 1..25: note = Oligonucleotide
  source 1..25: mol_type = other DNA
tgcgttcagttacaggatggaggag

SEQ ID NO: 38448 - DNA, 25 bp, synthetic construct
  misc_feature 1..25: note = Oligonucleotide
  source 1..25: mol_type = other DNA
gtgtgcgttcagttacaggatggag

SEQ ID NO: 38449 - DNA, 25 bp, synthetic construct
  misc_feature 1..25: note = Oligonucleotide
  source 1..25: mol_type = other DNA
gaggtgtgcgttcagttacaggatg

SEQ ID NO: 38450 - DNA, 25 bp, synthetic construct
  misc_feature 1..25: note = Oligonucleotide
  source 1..25: mol_type = other DNA
agagaggtgtgcgttcagttacagg

SEQ ID NO: 38451 - DNA, 25 bp, synthetic construct
  misc_feature 1..25: note = Oligonucleotide
  source 1..25: mol_type = other DNA
aggagagaggtgtgcgttcagttac

SEQ ID NO: 38452 - DNA, 25 bp, synthetic construct
  misc_feature 1..25: note = Oligonucleotide
  source 1..25: mol_type = other DNA
gacaggagagaggtgtgcgttcagt

SEQ ID NO: 38453 - DNA, 25 bp, synthetic construct
  misc_feature 1..25: note = Oligonucleotide
  source 1..25: mol_type = other DNA
gaggacaggagagaggtgtgcgttc

SEQ ID NO: 38454 - DNA, 25 bp, synthetic construct
  misc_feature 1..25: note = Oligonucleotide
  source 1..25: mol_type = other DNA
gaagaggacaggagagaggtgtgcg

SEQ ID NO: 38455 - DNA, 25 bp, synthetic construct
  misc_feature 1..25: note = Oligonucleotide
  source 1..25: mol_type = other DNA
tgtgaagaggacaggagagaggtgt

SEQ ID NO: 38456 - DNA, 25 bp, synthetic construct
  misc_feature 1..25: note = Oligonucleotide
  source 1..25: mol_type = other DNA
tcttgtgaagaggacaggagagagg

SEQ ID NO: 38457 - DNA, 25 bp, synthetic construct
  misc_feature 1..25: note = Oligonucleotide
  source 1..25: mol_type = other DNA
ggctcttgtgaagaggacaggagag

SEQ ID NO: 38458 - DNA, 25 bp, synthetic construct
  misc_feature 1..25: note = Oligonucleotide
  source 1..25: mol_type = other DNA
gagggctcttgtgaagaggacagga

SEQ ID NO: 38459 - DNA, 25 bp, synthetic construct
  misc_feature 1..25: note = Oligonucleotide
  source 1..25: mol_type = other DNA
ggggagggctcttgtgaagaggaca

SEQ ID NO: 38460 - DNA, 25 bp, synthetic construct
  misc_feature 1..25: note = Oligonucleotide
  source 1..25: mol_type = other DNA
cacggggagggctcttgtgaagagg

SEQ ID NO: 38461 - DNA, 25 bp, synthetic construct
  misc_feature 1..25: note = Oligonucleotide
  source 1..25: mol_type = other DNA
ctgcacggggagggctcttgtgaag

SEQ ID NO: 38462 - DNA, 25 bp, synthetic construct
  misc_feature 1..25: note = Oligonucleotide
  source 1..25: mol_type = other DNA
gggctgcacggggagggctcttgtg

SEQ ID NO: 38463 - DNA, 25 bp, synthetic construct
  misc_feature 1..25: note = Oligonucleotide
  source 1..25: mol_type = other DNA
ccagggctgcacggggagggctctt

SEQ ID NO: 38464 - DNA, 25 bp, synthetic construct
  misc_feature 1..25: note = Oligonucleotide
  source 1..25: mol_type = other DNA
ggcccagggctgcacggggagggct

SEQ ID NO: 38465 - DNA, 25 bp, synthetic construct
  misc_feature 1..25: note = Oligonucleotide
  source 1..25: mol_type = other DNA
ccaggcccagggctgcacggggagg

SEQ ID NO: 38466 - DNA, 25 bp, synthetic construct
  misc_feature 1..25: note = Oligonucleotide
  source 1..25: mol_type = other DNA
gccccaggcccagggctgcacgggg

SEQ ID NO: 38467 - DNA, 25 bp, synthetic construct
  misc_feature 1..25: note = Oligonucleotide
  source 1..25: mol_type = other DNA
tgtgccccaggcccagggctgcacg

SEQ ID NO: 38468 - DNA, 25 bp, synthetic construct
  misc_feature 1..25: note = Oligonucleotide
  source 1..25: mol_type = other DNA
ctctgtgccccaggcccagggctgc

SEQ ID NO: 38469 - DNA, 25 bp, synthetic construct
  misc_feature 1..25: note = Oligonucleotide
  source 1..25: mol_type = other DNA
aagctctgtgccccaggcccagggc

SEQ ID NO: 38470 - DNA, 25 bp, synthetic construct
  misc_feature 1..25: note = Oligonucleotide
  source 1..25: mol_type = other DNA
cccaagctctgtgccccaggcccag

SEQ ID NO: 38471 - DNA, 25 bp, synthetic construct
  misc_feature 1..25: note = Oligonucleotide
  source 1..25: mol_type = other DNA
atgcccaagctctgtgccccaggcc

SEQ ID NO: 38472 - DNA, 25 bp, synthetic construct
  misc_feature 1..25: note = Oligonucleotide
  source 1..25: mol_type = other DNA
tggatgcccaagctctgtgccccag

SEQ ID NO: 38473 - DNA, 25 bp, synthetic construct
  misc_feature 1..25: note = Oligonucleotide
  source 1..25: mol_type = other DNA
ccctggatgcccaagctctgtgccc

SEQ ID NO: 38474 - DNA, 25 bp, synthetic construct
  misc_feature 1..25: note = Oligonucleotide
  source 1..25: mol_type = other DNA
ggtccctggatgcccaagctctgtg

SEQ ID NO: 38475 - DNA, 25 bp, synthetic construct
  misc_feature 1..25: note = Oligonucleotide
  source 1..25: mol_type = other DNA
gctggtccctggatgcccaagctct

SEQ ID NO: 38476 - DNA, 25 bp, synthetic construct
  misc_feature 1..25: note = Oligonucleotide
  source 1..25: mol_type = other DNA
tgggctggtccctggatgcccaagc

SEQ ID NO: 38477 - DNA, 25 bp, synthetic construct
  misc_feature 1..25: note = Oligonucleotide
  source 1..25: mol_type = other DNA
gtctgggctggtccctggatgccca

SEQ ID NO: 38478 - DNA, 25 bp, synthetic construct
  misc_feature 1..25: note = Oligonucleotide
  source 1..25: mol_type = other DNA
ctggtctgggctggtccctggatgc

SEQ ID NO: 38479 - DNA, 25 bp, synthetic construct
  misc_feature 1..25: note = Oligonucleotide
  source 1..25: mol_type = other DNA
accctggtctgggctggtccctgga

SEQ ID NO: 38480 - DNA, 25 bp, synthetic construct
  misc_feature 1..25: note = Oligonucleotide
  source 1..25: mol_type = other DNA
aagaccctggtctgggctggtccct

SEQ ID NO: 38481 - DNA, 25 bp, synthetic construct
  misc_feature 1..25: note = Oligonucleotide
  source 1..25: mol_type = other DNA
agcaagaccctggtctgggctggtc

SEQ ID NO: 38482 - DNA, 25 bp, synthetic construct
  misc_feature 1..25: note = Oligonucleotide
  source 1..25: mol_type = other DNA
ccgagcaagaccctggtctgggctg

SEQ ID NO: 38483 - DNA, 25 bp, synthetic construct
  misc_feature 1..25: note = Oligonucleotide
  source 1..25: mol_type = other DNA
gctccgagcaagaccctggtctggg

SEQ ID NO: 38484 - DNA, 25 bp, synthetic construct
  misc_feature 1..25: note = Oligonucleotide
  source 1..25: mol_type = other DNA
cgggctccgagcaagaccctggtct

SEQ ID NO: 38485 - DNA, 25 bp, synthetic construct
  misc_feature 1..25: note = Oligonucleotide
  source 1..25: mol_type = other DNA
gcccgggctccgagcaagaccctgg

SEQ ID NO: 38486 - DNA, 25 bp, synthetic construct
  misc_feature 1..25: note = Oligonucleotide
  source 1..25: mol_type = other DNA
agagcccgggctccgagcaagaccc

SEQ ID NO: 38487 - DNA, 25 bp, synthetic construct
  misc_feature 1..25: note = Oligonucleotide
  source 1..25: mol_type = other DNA
cccagagcccgggctccgagcaaga

SEQ ID NO: 38488 - DNA, 25 bp, synthetic construct
  misc_feature 1..25: note = Oligonucleotide
  source 1..25: mol_type = other DNA
gagcccagagcccgggctccgagca

SEQ ID NO: 38489 - DNA, 25 bp, synthetic construct
  misc_feature 1..25: note = Oligonucleotide
  source 1..25: mol_type = other DNA
agggagcccagagcccgggctccga

SEQ ID NO: 38490 - DNA, 25 bp, synthetic construct
  misc_feature 1..25: note = Oligonucleotide
  source 1..25: mol_type = other DNA
aacagggagcccagagcccgggctc

SEQ ID NO: 38491 - DNA, 25 bp, synthetic construct
  misc_feature 1..25: note = Oligonucleotide
  source 1..25: mol_type = other DNA
agaaacagggagcccagagcccggg

SEQ ID NO: 38492 - DNA, 25 bp, synthetic construct
  misc_feature 1..25: note = Oligonucleotide
  source 1..25: mol_type = other DNA
gggagaaacagggagcccagagccc

SEQ ID NO: 38493 - DNA, 25 bp, synthetic construct
  misc_feature 1..25: note = Oligonucleotide
  source 1..25: mol_type = other DNA
caggggagaaacagggagcccagag

SEQ ID NO: 38494 - DNA, 25 bp, synthetic construct
  misc_feature 1..25: note = Oligonucleotide
  source 1..25: mol_type = other DNA
gggcaggggagaaacagggagccca

SEQ ID NO: 38495 - DNA, 25 bp, synthetic construct
  misc_feature 1..25: note = Oligonucleotide
  source 1..25: mol_type = other DNA
ggagggcaggggagaaacagggagc

SEQ ID NO: 38496 - DNA, 25 bp, synthetic construct
  misc_feature 1..25: note = Oligonucleotide
  source 1..25: mol_type = other DNA
aatggagggcaggggagaaacaggg

SEQ ID NO: 38497 - DNA, 25 bp, synthetic construct
  misc_feature 1..25: note = Oligonucleotide
  source 1..25: mol_type = other DNA
gggaatggagggcaggggagaaaca

SEQ ID NO: 38498 - DNA, 25 bp, synthetic construct
  misc_feature 1..25: note = Oligonucleotide
  source 1..25: mol_type = other DNA
gcggggaatggagggcaggggagaa

SEQ ID NO: 38499 - DNA, 25 bp, synthetic construct
  misc_feature 1..25: note = Oligonucleotide
  source 1..25: mol_type = other DNA
tgggcggggaatggagggcagggga

SEQ ID NO: 38500 - DNA, 25 bp, synthetic construct
  misc_feature 1..25: note = Oligonucleotide
  source 1..25: mol_type = other DNA
tggtgggcggggaatggagggcagg

SEQ ID NO: 38501 - DNA, 25 bp, synthetic construct
  misc_feature 1..25: note = Oligonucleotide
  source 1..25: mol_type = other DNA
ccgtggtgggcggggaatggagggc

SEQ ID NO: 38502 - DNA, 25 bp, synthetic construct
  misc_feature 1..25: note = Oligonucleotide
  source 1..25: mol_type = other DNA
gacccgtggtgggcggggaatggag

SEQ ID NO: 38503 - DNA, 25 bp, synthetic construct
  misc_feature 1..25: note = Oligonucleotide
  source 1..25: mol_type = other DNA
tgggacccgtggtgggcggggaatg

SEQ ID NO: 38504 - DNA, 25 bp, synthetic construct
  misc_feature 1..25: note = Oligonucleotide
  source 1..25: mol_type = other DNA
ggttgggacccgtggtgggcgggga

SEQ ID NO: 38505 - DNA, 25 bp, synthetic construct
  misc_feature 1..25: note = Oligonucleotide
  source 1..25: mol_type = other DNA
tggggttgggacccgtggtgggcgg

SEQ ID NO: 38506 - DNA, 25 bp, synthetic construct
  misc_feature 1..25: note = Oligonucleotide
  source 1..25: mol_type = other DNA
agatggggttgggacccgtggtggg

SEQ ID NO: 38507 - DNA, 25 bp, synthetic construct
  misc_feature 1..25: note = Oligonucleotide
  source 1..25: mol_type = other DNA
ggaagatggggttgggacccgtggt

SEQ ID NO: 38508 - DNA, 25 bp, synthetic construct
  misc_feature 1..25: note = Oligonucleotide
  source 1..25: mol_type = other DNA
tcgggaagatggggttgggacccgt

SEQ ID NO: 38509 - DNA, 25 bp, synthetic construct
  misc_feature 1..25: note = Oligonucleotide
  source 1..25: mol_type = other DNA
tgctcgggaagatggggttgggacc

SEQ ID NO: 38510 - DNA, 25 bp, synthetic construct
  misc_feature 1..25: note = Oligonucleotide
  source 1..25: mol_type = other DNA
gaatgctcgggaagatggggttggg

SEQ ID NO: 38511 - DNA, 25 bp, synthetic construct
  misc_feature 1..25: note = Oligonucleotide
  source 1..25: mol_type = other DNA
ctagaatgctcgggaagatggggtt

SEQ ID NO: 38512 - DNA, 25 bp, synthetic construct
  misc_feature 1..25: note = Oligonucleotide
  source 1..25: mol_type = other DNA
gagctagaatgctcgggaagatggg

SEQ ID NO: 38513 - DNA, 25 bp, synthetic construct
  misc_feature 1..25: note = Oligonucleotide
  source 1..25: mol_type = other DNA
gaggagctagaatgctcgggaagat

SEQ ID NO: 38514 - DNA, 25 bp, synthetic construct
  misc_feature 1..25: note = Oligonucleotide
  source 1..25: mol_type = other DNA
cgcgaggagctagaatgctcgggaa

SEQ ID NO: 38515 - DNA, 25 bp, synthetic construct
  misc_feature 1..25: note = Oligonucleotide
  source 1..25: mol_type = other DNA
cggcgcgaggagctagaatgctcgg

SEQ ID NO: 38516 - DNA, 25 bp, synthetic construct
  misc_feature 1..25: note = Oligonucleotide
  source 1..25: mol_type = other DNA
acccggcgcgaggagctagaatgct

SEQ ID NO: 38517 - DNA, 25 bp, synthetic construct
  misc_feature 1..25: note = Oligonucleotide
  source 1..25: mol_type = other DNA
agaacccggcgcgaggagctagaat

SEQ ID NO: 38518 - DNA, 25 bp, synthetic construct
  misc_feature 1..25: note = Oligonucleotide
  source 1..25: mol_type = other DNA
ggcagaacccggcgcgaggagctag

SEQ ID NO: 38519 - DNA, 25 bp, synthetic construct
  misc_feature 1..25: note = Oligonucleotide
  source 1..25: mol_type = other DNA
cgcggcagaacccggcgcgaggagc

SEQ ID NO: 38520 - DNA, 25 bp, synthetic construct
  misc_feature 1..25: note = Oligonucleotide
  source 1..25: mol_type = other DNA
gcccgcggcagaacccggcgcgagg

SEQ ID NO: 38521 - DNA, 25 bp, synthetic construct
  misc_feature 1..25: note = Oligonucleotide
  source 1..25: mol_type = other DNA
gacgcccgcggcagaacccggcgcg

SEQ ID NO: 38522 - DNA, 25 bp, synthetic construct
  misc_feature 1..25: note = Oligonucleotide
  source 1..25: mol_type = other DNA
atggacgcccgcggcagaacccggc

SEQ ID NO: 38523 - DNA, 25 bp, synthetic construct
  misc_feature 1..25: note = Oligonucleotide
  source 1..25: mol_type = other DNA
acaatggacgcccgcggcagaaccc

SEQ ID NO: 38524 - DNA, 25 bp, synthetic construct
  misc_feature 1..25: note = Oligonucleotide
  source 1..25: mol_type = other DNA
gacacaatggacgcccgcggcagaa

SEQ ID NO: 38525 - DNA, 25 bp, synthetic construct
  misc_feature 1..25: note = Oligonucleotide
  source 1..25: mol_type = other DNA
ccggacacaatggacgcccgcggca

SEQ ID NO: 38526 - DNA, 25 bp, synthetic construct
  misc_feature 1..25: note = Oligonucleotide
  source 1..25: mol_type = other DNA
cgtccggacacaatggacgcccgcg

SEQ ID NO: 38527 - DNA, 25 bp, synthetic construct
  misc_feature 1..25: note = Oligonucleotide
  source 1..25: mol_type = other DNA
caccgtccggacacaatggacgccc

SEQ ID NO: 38528 - DNA, 25 bp, synthetic construct
  misc_feature 1..25: note = Oligonucleotide
  source 1..25: mol_type = other DNA
agccaccgtccggacacaatggacg

SEQ ID NO: 38529 - DNA, 25 bp, synthetic construct
  misc_feature 1..25: note = Oligonucleotide
  source 1..25: mol_type = other DNA
ggaagccaccgtccggacacaatgg

SEQ ID NO: 38530 - DNA, 25 bp, synthetic construct
  misc_feature 1..25: note = Oligonucleotide
  source 1..25: mol_type = other DNA
cggggaagccaccgtccggacacaa

SEQ ID NO: 38531 - DNA, 25 bp, synthetic construct
  misc_feature 1..25: note = Oligonucleotide
  source 1..25: mol_type = other DNA
ccccggggaagccaccgtccggaca

SEQ ID NO: 38532 - DNA, 25 bp, synthetic construct
  misc_feature 1..25: note = Oligonucleotide
  source 1..25: mol_type = other DNA
ccaccccggggaagccaccgtccgg

SEQ ID NO: 38533 - DNA, 25 bp, synthetic construct
  misc_feature 1..25: note = Oligonucleotide
  source 1..25: mol_type = other DNA
actccaccccggggaagccaccgtc

SEQ ID NO: 38534 - DNA, 25 bp, synthetic construct
  misc_feature 1..25: note = Oligonucleotide
  source 1..25: mol_type = other DNA
ccgactccaccccggggaagccacc

SEQ ID NO: 38535 - DNA, 25 bp, synthetic construct
  misc_feature 1..25: note = Oligonucleotide
  source 1..25: mol_type = other DNA
gacccgactccaccccggggaagcc

SEQ ID NO: 38536 - DNA, 25 bp, synthetic construct
  misc_feature 1..25: note = Oligonucleotide
  source 1..25: mol_type = other DNA
cttgacccgactccaccccggggaa

SEQ ID NO: 38537 - DNA, 25 bp, synthetic construct
  misc_feature 1..25: note = Oligonucleotide
  source 1..25: mol_type = other DNA
agccttgacccgactccaccccggg

SEQ ID NO: 38538 - DNA, 25 bp, synthetic construct
  misc_feature 1..25: note = Oligonucleotide
  source 1..25: mol_type = other DNA
gccagccttgacccgactccacccc

SEQ ID NO: 38539 - DNA, 25 bp, synthetic construct
  misc_feature 1..25: note = Oligonucleotide
  source 1..25: mol_type = other DNA
gaggccagccttgacccgactccac

SEQ ID NO: 38540 - DNA, 25 bp, synthetic construct
  misc_feature 1..25: note = Oligonucleotide
  source 1..25: mol_type = other DNA
acagaggccagccttgacccgactc

SEQ ID NO: 38541 - DNA, 25 bp, synthetic construct
  misc_feature 1..25: note = Oligonucleotide
  source 1..25: mol_type = other DNA
cccacagaggccagccttgacccga

SEQ ID NO: 38542 - DNA, 25 bp, synthetic construct
  misc_feature 1..25: note = Oligonucleotide
  source 1..25: mol_type = other DNA
cctcccacagaggccagccttgacc

SEQ ID NO: 38543 - DNA, 25 bp, synthetic construct
  misc_feature 1..25: note = Oligonucleotide
  source 1..25: mol_type = other DNA
ccccctcccacagaggccagccttg

SEQ ID NO: 38544 - DNA, 25 bp, synthetic construct
  misc_feature 1..25: note = Oligonucleotide
  source 1..25: mol_type = other DNA
caaccccctcccacagaggccagcc

SEQ ID NO: 38545 - DNA, 25 bp, synthetic construct
  misc_feature 1..25: note = Oligonucleotide
  source 1..25: mol_type = other DNA
cggcaaccccctcccacagaggcca

SEQ ID NO: 38546 - DNA, 25 bp, synthetic construct
  misc_feature 1..25: note = Oligonucleotide
  source 1..25: mol_type = other DNA
ccccggcaaccccctcccacagagg

SEQ ID NO: 38547 - DNA, 25 bp, synthetic construct
  misc_feature 1..25: note = Oligonucleotide
  source 1..25: mol_type = other DNA
ggaccccggcaaccccctcccacag

SEQ ID NO: 38548 - DNA, 25 bp, synthetic construct
  misc_feature 1..25: note = Oligonucleotide
  source 1..25: mol_type = other DNA
tggggaccccggcaaccccctccca

SEQ ID NO: 38549 - DNA, 25 bp, synthetic construct
  misc_feature 1..25: note = Oligonucleotide
  source 1..25: mol_type = other DNA
tcctggggaccccggcaaccccctc

SEQ ID NO: 38550 - DNA, 25 bp, synthetic construct
  misc_feature 1..25: note = Oligonucleotide
  source 1..25: mol_type = other DNA
ggttcctggggaccccggcaacccc

SEQ ID NO: 38551 - DNA, 25 bp, synthetic construct
  misc_feature 1..25: note = Oligonucleotide
  source 1..25: mol_type = other DNA
agaggttcctggggaccccggcaac

SEQ ID NO: 38552 - DNA, 25 bp, synthetic construct
  misc_feature 1..25: note = Oligonucleotide
  source 1..25: mol_type = other DNA
cggagaggttcctggggaccccggc

SEQ ID NO: 38553 - DNA, 25 bp, synthetic construct
  misc_feature 1..25: note = Oligonucleotide
  source 1..25: mol_type = other DNA
cttcggagaggttcctggggacccc

SEQ ID NO: 38554 - DNA, 25 bp, synthetic construct
  misc_feature 1..25: note = Oligonucleotide
  source 1..25: mol_type = other DNA
tgccttcggagaggttcctggggac

SEQ ID NO: 38555 - DNA, 25 bp, synthetic construct
  misc_feature 1..25: note = Oligonucleotide
  source 1..25: mol_type = other DNA
tgctgccttcggagaggttcctggg

SEQ ID NO: 38556 - DNA, 25 bp, synthetic construct
  misc_feature 1..25: note = Oligonucleotide
  source 1..25: mol_type = other DNA
tggtgctgccttcggagaggttcct

SEQ ID NO: 38557 - DNA, 25 bp, synthetic construct
  misc_feature 1..25: note = Oligonucleotide
  source 1..25: mol_type = other DNA
gggtggtgctgccttcggagaggtt

SEQ ID NO: 38558 - DNA, 25 bp, synthetic construct
  misc_feature 1..25: note = Oligonucleotide
  source 1..25: mol_type = other DNA
ggggggtggtgctgccttcggagag

SEQ ID NO: 38559 - DNA, 25 bp, synthetic construct
  misc_feature 1..25: note = Oligonucleotide
  source 1..25: mol_type = other DNA
ggcggggggtggtgctgccttcgga

SEQ ID NO: 38560 - DNA, 25 bp, synthetic construct
  misc_feature 1..25: note = Oligonucleotide
  source 1..25: mol_type = other DNA
ctgggcggggggtggtgctgccttc

SEQ ID NO: 38561 - DNA, 25 bp, synthetic construct
  misc_feature 1..25: note = Oligonucleotide
  source 1..25: mol_type = other DNA
gcgctgggcggggggtggtgctgcc

SEQ ID NO: 38562 - DNA, 25 bp, synthetic construct
  misc_feature 1..25: note = Oligonucleotide
  source 1..25: mol_type = other DNA
agggcgctgggcggggggtggtgct

SEQ ID NO: 38563 - DNA, 25 bp, synthetic construct
  misc_feature 1..25: note = Oligonucleotide
  source 1..25: mol_type = other DNA
gccagggcgctgggcggggggtggt

SEQ ID NO: 38564 - DNA, 25 bp, synthetic construct
  misc_feature 1..25: note = Oligonucleotide
  source 1..25: mol_type = other DNA
ccagccagggcgctgggcggggggt

SEQ ID NO: 38565 - DNA, 25 bp, synthetic construct
  misc_feature 1..25: note = Oligonucleotide
  source 1..25: mol_type = other DNA
agaccagccagggcgctgggcgggg

SEQ ID NO: 38566 - DNA, 25 bp, synthetic construct
  misc_feature 1..25: note = Oligonucleotide
  source 1..25: mol_type = other DNA
gtgagaccagccagggcgctgggcg

SEQ ID NO: 38567 - DNA, 25 bp, synthetic construct
  misc_feature 1..25: note = Oligonucleotide
  source 1..25: mol_type = other DNA
ccggtgagaccagccagggcgctgg

SEQ ID NO: 38568 - DNA, 25 bp, synthetic construct
  misc_feature 1..25: note = Oligonucleotide
  source 1..25: mol_type = other DNA
gggccggtgagaccagccagggcgc

SEQ ID NO: 38569 - DNA, 25 bp, synthetic construct
  misc_feature 1..25: note = Oligonucleotide
  source 1..25: mol_type = other DNA
gaagggccggtgagaccagccaggg

SEQ ID NO: 38570 - DNA, 25 bp, synthetic construct
  misc_feature 1..25: note = Oligonucleotide
  source 1..25: mol_type = other DNA
acggaagggccggtgagaccagcca

SEQ ID NO: 38571 - DNA, 25 bp, synthetic construct
  misc_feature 1..25: note = Oligonucleotide
  source 1..25: mol_type = other DNA
cggacggaagggccggtgagaccag

SEQ ID NO: 38572 - DNA, 25 bp, synthetic construct
  misc_feature 1..25: note = Oligonucleotide
  source 1..25: mol_type = other DNA
ctgcggacggaagggccggtgagac

SEQ ID NO: 38573 - DNA, 25 bp, synthetic construct
  misc_feature 1..25: note = Oligonucleotide
  source 1..25: mol_type = other DNA
cccctgcggacggaagggccggtga

SEQ ID NO: 38574 - DNA, 25 bp, synthetic construct
  misc_feature 1..25: note = Oligonucleotide
  source 1..25: mol_type = other DNA
cctcccctgcggacggaagggccgg

SEQ ID NO: 38575 - DNA, 25 bp, synthetic construct
  misc_feature 1..25: note = Oligonucleotide
  source 1..25: mol_type = other DNA
cgtcctcccctgcggacggaagggc

SEQ ID NO: 38576 - DNA, 25 bp, synthetic construct
  misc_feature 1..25: note = Oligonucleotide
  source 1..25: mol_type = other DNA
tctcgtcctcccctgcggacggaag

SEQ ID NO: 38577 - DNA, 25 bp, synthetic construct
  misc_feature 1..25: note = Oligonucleotide
  source 1..25: mol_type = other DNA
gcttctcgtcctcccctgcggacgg

SEQ ID NO: 38578 - DNA, 25 bp, synthetic construct
  misc_feature 1..25: note = Oligonucleotide
  source 1..25: mol_type = other DNA
ccagcttctcgtcctcccctgcgga

SEQ ID NO: 38579 - DNA, 25 bp, synthetic construct
  misc_feature 1..25: note = Oligonucleotide
  source 1..25: mol_type = other DNA
acgccagcttctcgtcctcccctgc

SEQ ID NO: 38580 - DNA, 25 bp, synthetic construct
  misc_feature 1..25: note = Oligonucleotide
  source 1..25: mol_type = other DNA
gggacgccagcttctcgtcctcccc

SEQ ID NO: 38581 - DNA, 25 bp, synthetic construct
  misc_feature 1..25: note = Oligonucleotide
  source 1..25: mol_type = other DNA
gcagggacgccagcttctcgtcctc

SEQ ID NO: 38582 - DNA, 25 bp, synthetic construct
  misc_feature 1..25: note = Oligonucleotide
  source 1..25: mol_type = other DNA
ccagcagggacgccagcttctcgtc

SEQ ID NO: 38583 - DNA, 25 bp, synthetic construct
  misc_feature 1..25: note = Oligonucleotide
  source 1..25: mol_type = other DNA
cttccagcagggacgccagcttctc

SEQ ID NO: 38584 - DNA, 25 bp, synthetic construct
  misc_feature 1..25: note = Oligonucleotide
  source 1..25: mol_type = other DNA
gcccttccagcagggacgccagctt

SEQ ID NO: 38585 - DNA, 25 bp, synthetic construct
  misc_feature 1..25: note = Oligonucleotide
  source 1..25: mol_type = other DNA
agcgcccttccagcagggacgccag

SEQ ID NO: 38586 - DNA, 25 bp, synthetic construct
  misc_feature 1..25: note = Oligonucleotide
  source 1..25: mol_type = other DNA
ggaagcgcccttccagcagggacgc

SEQ ID NO: 38587 - DNA, 25 bp, synthetic construct
  misc_feature 1..25: note = Oligonucleotide
  source 1..25: mol_type = other DNA
gcgggaagcgcccttccagcaggga

SEQ ID NO: 38588 - DNA, 25 bp, synthetic construct
  misc_feature 1..25: note = Oligonucleotide
  source 1..25: mol_type = other DNA
tccgcgggaagcgcccttccagcag

SEQ ID NO: 38589 - DNA, 25 bp, synthetic construct
  misc_feature 1..25: note = Oligonucleotide
  source 1..25: mol_type = other DNA
tgctccgcgggaagcgcccttccag

SEQ ID NO: 38590 - DNA, 25 bp, synthetic construct
  misc_feature 1..25: note = Oligonucleotide
  source 1..25: mol_type = other DNA
aggtgctccgcgggaagcgcccttc

SEQ ID NO: 38591 - DNA, 25 bp, synthetic construct
  misc_feature 1..25: note = Oligonucleotide
  source 1..25: mol_type = other DNA
tcgaggtgctccgcgggaagcgccc

SEQ ID NO: 38592 - DNA, 25 bp, synthetic construct
  misc_feature 1..25: note = Oligonucleotide
  source 1..25: mol_type = other DNA
gcatcgaggtgctccgcgggaagcg

SEQ ID NO: 38593 - DNA, 25 bp, synthetic construct
  misc_feature 1..25: note = Oligonucleotide
  source 1..25: mol_type = other DNA
cttgcatcgaggtgctccgcgggaa

SEQ ID NO: 38594 - DNA, 25 bp, synthetic construct
  misc_feature 1..25: note = Oligonucleotide
  source 1..25: mol_type = other DNA
ggtcttgcatcgaggtgctccgcgg

SEQ ID NO: 38595 - DNA, 25 bp, synthetic construct
  misc_feature 1..25: note = Oligonucleotide
  source 1..25: mol_type = other DNA
ccgggtcttgcatcgaggtgctccg

SEQ ID NO: 38596 - DNA, 25 bp, synthetic construct
  misc_feature 1..25: note = Oligonucleotide
  source 1..25: mol_type = other DNA
gcaccgggtcttgcatcgaggtgct

SEQ ID NO: 38597 - DNA, 25 bp, synthetic construct
  misc_feature 1..25: note = Oligonucleotide
  source 1..25: mol_type = other DNA
cgcgcaccgggtcttgcatcgaggt

SEQ ID NO: 38598 - DNA, 25 bp, synthetic construct
  misc_feature 1..25: note = Oligonucleotide
  source 1..25: mol_type = other DNA
cctcgcgcaccgggtcttgcatcga

SEQ ID NO: 38599 - DNA, 25 bp, synthetic construct
  misc_feature 1..25: note = Oligonucleotide
  source 1..25: mol_type = other DNA
gaccctcgcgcaccgggtcttgcat

SEQ ID NO: 38600 - DNA, 25 bp, synthetic construct
  misc_feature 1..25: note = Oligonucleotide
  source 1..25: mol_type = other DNA
cgcgaccctcgcgcaccgggtcttg

SEQ ID NO: 38601 - DNA, 25 bp, synthetic construct
  misc_feature 1..25: note = Oligonucleotide
  source 1..25: mol_type = other DNA
tgccgcgaccctcgcgcaccgggtc

SEQ ID NO: 38602 - DNA, 25 bp, synthetic construct
  misc_feature 1..25: note = Oligonucleotide
  source 1..25: mol_type = other DNA
ggatgccgcgaccctcgcgcaccgg

SEQ ID NO: 38603 - DNA, 25 bp, synthetic construct
  misc_feature 1..25: note = Oligonucleotide
  source 1..25: mol_type = other DNA
gcgggatgccgcgaccctcgcgcac

SEQ ID NO: 38604 - DNA, 25 bp, synthetic construct
  misc_feature 1..25: note = Oligonucleotide
  source 1..25: mol_type = other DNA
ggggcgggatgccgcgaccctcgcg

SEQ ID NO: 38605 - DNA, 25 bp, synthetic construct
  misc_feature 1..25: note = Oligonucleotide
  source 1..25: mol_type = other DNA
gcgggggcgggatgccgcgaccctc

SEQ ID NO: 38606 - DNA, 25 bp, synthetic construct
  misc_feature 1..25: note = Oligonucleotide
  source 1..25: mol_type = other DNA
gcggcgggggcgggatgccgcgacc

SEQ ID NO: 38607 - DNA, 25 bp, synthetic construct
  misc_feature 1..25: note = Oligonucleotide
  source 1..25: mol_type = other DNA
tctgcggcgggggcgggatgccgcg

SEQ ID NO: 38608 - DNA, 25 bp, synthetic construct
  misc_feature 1..25: note = Oligonucleotide
  source 1..25: mol_type = other DNA
cggtctgcggcgggggcgggatgcc

SEQ ID NO: 38609 - DNA, 25 bp, synthetic construct
  misc_feature 1..25: note = Oligonucleotide
  source 1..25: mol_type = other DNA
gcgcggtctgcggcgggggcgggat

SEQ ID NO: 38610 - DNA, 25 bp, synthetic construct
  misc_feature 1..25: note = Oligonucleotide
  source 1..25: mol_type = other DNA
gcggcgcggtctgcggcgggggcgg

SEQ ID NO: 38611 - DNA, 25 bp, synthetic construct
  misc_feature 1..25: note = Oligonucleotide
  source 1..25: mol_type = other DNA
gaggcggcgcggtctgcggcggggg

SEQ ID NO: 38612 - DNA, 25 bp, synthetic construct
  misc_feature 1..25: note = Oligonucleotide
  source 1..25: mol_type = other DNA
ggggaggcggcgcggtctgcggcgg

SEQ ID NO: 38613 - DNA, 25 bp, synthetic construct
  misc_feature 1..25: note = Oligonucleotide
  source 1..25: mol_type = other DNA
gcgggggaggcggcgcggtctgcgg

SEQ ID NO: 38614 - DNA, 25 bp, synthetic construct
  misc_feature 1..25: note = Oligonucleotide
  source 1..25: mol_type = other DNA
cgggcgggggaggcggcgcggtctg

SEQ ID NO: 38615 - DNA, 25 bp, synthetic construct
  misc_feature 1..25: note = Oligonucleotide
  source 1..25: mol_type = other DNA
gcgcgggcgggggaggcggcgcggt

SEQ ID NO: 38616 - DNA, 25 bp, synthetic construct
  misc_feature 1..25: note = Oligonucleotide
  source 1..25: mol_type = other DNA
agggcgcgggcgggggaggcggcgc

SEQ ID NO: 38617 - DNA, 25 bp, synthetic construct
  misc_feature 1..25: note = Oligonucleotide
  source 1..25: mol_type = other DNA
agtagggcgcgggcgggggaggcgg

SEQ ID NO: 38618 - DNA, 25 bp, synthetic construct
  misc_feature 1..25: note = Oligonucleotide
  source 1..25: mol_type = other DNA
agtagtagggcgcgggcgggggagg

SEQ ID NO: 38619 - DNA, 25 bp, synthetic construct
  misc_feature 1..25: note = Oligonucleotide
  source 1..25: mol_type = other DNA
cgaagtagtagggcgcgggcggggg

SEQ ID NO: 38620 - DNA, 25 bp, synthetic construct
  misc_feature 1..25: note = Oligonucleotide
  source 1..25: mol_type = other DNA
agtcgaagtagtagggcgcgggcgg

SEQ ID NO: 38621 - DNA, 25 bp, synthetic construct
  misc_feature 1..25: note = Oligonucleotide
  source 1..25: mol_type = other DNA
ccgagtcgaagtagtagggcgcggg

SEQ ID NO: 38622 - DNA, 25 bp, synthetic construct
  misc_feature 1..25: note = Oligonucleotide
  source 1..25: mol_type = other DNA
gccccgagtcgaagtagtagggcgc

SEQ ID NO: 38623 - DNA, 25 bp, synthetic construct
  misc_feature 1..25: note = Oligonucleotide
  source 1..25: mol_type = other DNA
gcggccccgagtcgaagtagtaggg

SEQ ID NO: 38624 - DNA, 25 bp, synthetic construct
  misc_feature 1..25: note = Oligonucleotide
  source 1..25: mol_type = other DNA
ggggcggccccgagtcgaagtagta

SEQ ID NO: 38625 - DNA, 25 bp, synthetic construct
  misc_feature 1..25: note = Oligonucleotide
  source 1..25: mol_type = other DNA
ccgggggcggccccgagtcgaagta

SEQ ID NO: 38626 - DNA, 25 bp, synthetic construct
  misc_feature 1..25: note = Oligonucleotide
  source 1..25: mol_type = other DNA
aggccgggggcggccccgagtcgaa

SEQ ID NO: 38627 - DNA, 25 bp, synthetic construct
  misc_feature 1..25: note = Oligonucleotide
  source 1..25: mol_type = other DNA
agaaggccgggggcggccccgagtc

SEQ ID NO: 38628 - DNA, 25 bp, synthetic construct
  misc_feature 1..25: note = Oligonucleotide
  source 1..25: mol_type = other DNA
gcgagaaggccgggggcggccccga

SEQ ID NO: 38629 - DNA, 25 bp, synthetic construct
  misc_feature 1..25: note = Oligonucleotide
  source 1..25: mol_type = other DNA
gcggcgagaaggccgggggcggccc

SEQ ID NO: 38630 - DNA, 25 bp, synthetic construct
  misc_feature 1..25: note = Oligonucleotide
  source 1..25: mol_type = other DNA
gcggcggcgagaaggccgggggcgg

SEQ ID NO: 38631 - DNA, 25 bp, synthetic construct
  misc_feature 1..25: note = Oligonucleotide
  source 1..25: mol_type = other DNA
ggggcggcggcgagaaggccggggg

SEQ ID NO: 38632 - DNA, 25 bp, synthetic construct
  misc_feature 1..25: note = Oligonucleotide
  source 1..25: mol_type = other DNA
gcgggggcggcggcgagaaggccgg

SEQ ID NO: 38633 - DNA, 25 bp, synthetic construct
  misc_feature 1..25: note = Oligonucleotide
  source 1..25: mol_type = other DNA
ccggcgggggcggcggcgagaaggc

SEQ ID NO: 38634 - DNA, 25 bp, synthetic construct
  misc_feature 1..25: note = Oligonucleotide
  source 1..25: mol_type = other DNA
ggcccggcgggggcggcggcgagaa

SEQ ID NO: 38635 - DNA, 25 bp, synthetic construct
  misc_feature 1..25: note = Oligonucleotide
  source 1..25: mol_type = other DNA
cgcggcccggcgggggcggcggcga

SEQ ID NO: 38636 - DNA, 25 bp, synthetic construct
  misc_feature 1..25: note = Oligonucleotide
  source 1..25: mol_type = other DNA
aggcgcggcccggcgggggcggcgg

SEQ ID NO: 38637 - DNA, 25 bp, synthetic construct
  misc_feature 1..25: note = Oligonucleotide
  source 1..25: mol_type = other DNA
cgtaggcgcggcccggcgggggcgg

SEQ ID NO: 38638 - DNA, 25 bp, synthetic construct
  misc_feature 1..25: note = Oligonucleotide
  source 1..25: mol_type = other DNA
tgtcgtaggcgcggcccggcggggg

SEQ ID NO: 38639 - DNA, 25 bp, synthetic construct
  misc_feature 1..25: note = Oligonucleotide
  source 1..25: mol_type = other DNA
ccgtgtcgtaggcgcggcccggcgg

SEQ ID NO: 38640 - DNA, 25 bp, synthetic construct
  misc_feature 1..25: note = Oligonucleotide
  source 1..25: mol_type = other DNA
gcaccgtgtcgtaggcgcggcccgg

SEQ ID NO: 38641 - DNA, 25 bp, synthetic construct
  misc_feature 1..25: note = Oligonucleotide
  source 1..25: mol_type = other DNA
agcgcaccgtgtcgtaggcgcggcc

SEQ ID NO: 38642 - DNA, 25 bp, synthetic construct
  misc_feature 1..25: note = Oligonucleotide
  source 1..25: mol_type = other DNA
tggagcgcaccgtgtcgtaggcgcg

SEQ ID NO: 38643 - DNA, 25 bp, synthetic construct
  misc_feature 1..25: note = Oligonucleotide
  source 1..25: mol_type = other DNA
agctggagcgcaccgtgtcgtaggc

SEQ ID NO: 38644 - DNA, 25 bp, synthetic construct
  misc_feature 1..25: note = Oligonucleotide
  source 1..25: mol_type = other DNA
tgaagctggagcgcaccgtgtcgta

SEQ ID NO: 38645 - DNA, 25 bp, synthetic construct
  misc_feature 1..25: note = Oligonucleotide
  source 1..25: mol_type = other DNA
gcttgaagctggagcgcaccgtgtc

SEQ ID NO: 38646 - DNA, 25 bp, synthetic construct
  misc_feature 1..25: note = Oligonucleotide
  source 1..25: mol_type = other DNA
cgggcttgaagctggagcgcaccgt

SEQ ID NO: 38647 - DNA, 25 bp, synthetic construct
  misc_feature 1..25: note = Oligonucleotide
  source 1..25: mol_type = other DNA
ggccgggcttgaagctggagcgcac

SEQ ID NO: 38648 - DNA, 25 bp, synthetic construct
  misc_feature 1..25: note = Oligonucleotide
  source 1..25: mol_type = other DNA
ccaggccgggcttgaagctggagcg

SEQ ID NO: 38649 - DNA, 25 bp, synthetic construct
  misc_feature 1..25: note = Oligonucleotide
  source 1..25: mol_type = other DNA
cctccaggccgggcttgaagctgga

SEQ ID NO: 38650 - DNA, 25 bp, synthetic construct
  misc_feature 1..25: note = Oligonucleotide
  source 1..25: mol_type = other DNA
gcgcctccaggccgggcttgaagct

SEQ ID NO: 38651 - DNA, 25 bp, synthetic construct
  misc_feature 1..25: note = Oligonucleotide
  source 1..25: mol_type = other DNA
ggcgcgcctccaggccgggcttgaa

SEQ ID NO: 38652 - DNA, 25 bp, synthetic construct
  misc_feature 1..25: note = Oligonucleotide
  source 1..25: mol_type = other DNA
ccaggcgcgcctccaggccgggctt

SEQ ID NO: 38653 - DNA, 25 bp, synthetic construct
  misc_feature 1..25: note = Oligonucleotide
  source 1..25: mol_type = other DNA
cgcccaggcgcgcctccaggccggg

SEQ ID NO: 38654 - DNA, 25 bp, synthetic construct
  misc_feature 1..25: note = Oligonucleotide
  source 1..25: mol_type = other DNA
ccgcgcccaggcgcgcctccaggcc

SEQ ID NO: 38655 - DNA, 25 bp, synthetic construct
  misc_feature 1..25: note = Oligonucleotide
  source 1..25: mol_type = other DNA
cgcccgcgcccaggcgcgcctccag

SEQ ID NO: 38656 - DNA, 25 bp, synthetic construct
  misc_feature 1..25: note = Oligonucleotide
  source 1..25: mol_type = other DNA
cagcgcccgcgcccaggcgcgcctc

SEQ ID NO: 38657 - DNA, 25 bp, synthetic construct
  misc_feature 1..25: note = Oligonucleotide
  source 1..25: mol_type = other DNA
cggcagcgcccgcgcccaggcgcgc

SEQ ID NO: 38658 - DNA, 25 bp, synthetic construct
  misc_feature 1..25: note = Oligonucleotide
  source 1..25: mol_type = other DNA
ggccggcagcgcccgcgcccaggcg

SEQ ID NO: 38659 - DNA, 25 bp, synthetic construct
  misc_feature 1..25: note = Oligonucleotide
  source 1..25: mol_type = other DNA
acaggccggcagcgcccgcgcccag

SEQ ID NO: 38660 - DNA, 25 bp, synthetic construct
  misc_feature 1..25: note = Oligonucleotide
  source 1..25: mol_type = other DNA
cgtacaggccggcagcgcccgcgcc

SEQ ID NO: 38661 - DNA, 25 bp, synthetic construct
  misc_feature 1..25: note = Oligonucleotide
  source 1..25: mol_type = other DNA
gctcgtacaggccggcagcgcccgc

SEQ ID NO: 38662 - DNA, 25 bp, synthetic construct
  misc_feature 1..25: note = Oligonucleotide
  source 1..25: mol_type = other DNA
ccggctcgtacaggccggcagcgcc

SEQ ID NO: 38663 - DNA, 25 bp, synthetic construct
  misc_feature 1..25: note = Oligonucleotide
  source 1..25: mol_type = other DNA
cgcccggctcgtacaggccggcagc

SEQ ID NO: 38664 - DNA, 25 bp, synthetic construct
  misc_feature 1..25: note = Oligonucleotide
  source 1..25: mol_type = other DNA
ccgcgcccggctcgtacaggccggc

SEQ ID NO: 38665 - DNA, 25 bp, synthetic construct
  misc_feature 1..25: note = Oligonucleotide
  source 1..25: mol_type = other DNA
gggccgcgcccggctcgtacaggcc

SEQ ID NO: 38666 - DNA, 25 bp, synthetic construct
  misc_feature 1..25: note = Oligonucleotide
  source 1..25: mol_type = other DNA
cgagggccgcgcccggctcgtacag

SEQ ID NO: 38667 - DNA, 25 bp, synthetic construct
  misc_feature 1..25: note = Oligonucleotide
  source 1..25: mol_type = other DNA
ggccgagggccgcgcccggctcgta

SEQ ID NO: 38668 - DNA, 25 bp, synthetic construct
  misc_feature 1..25: note = Oligonucleotide
  source 1..25: mol_type = other DNA
gcgggccgagggccgcgcccggctc

SEQ ID NO: 38669 - DNA, 25 bp, synthetic construct
  misc_feature 1..25: note = Oligonucleotide
  source 1..25: mol_type = other DNA
gcagcgggccgagggccgcgcccgg

SEQ ID NO: 38670 - DNA, 25 bp, synthetic construct
  misc_feature 1..25: note = Oligonucleotide
  source 1..25: mol_type = other DNA
acggcagcgggccgagggccgcgcc

SEQ ID NO: 38671 - DNA, 25 bp, synthetic construct
  misc_feature 1..25: note = Oligonucleotide
  source 1..25: mol_type = other DNA
gatacggcagcgggccgagggccgc

SEQ ID NO: 38672 - DNA, 25 bp, synthetic construct
  misc_feature 1..25: note = Oligonucleotide
  source 1..25: mol_type = other DNA
cgggatacggcagcgggccgagggc

SEQ ID NO: 38673 - DNA, 25 bp, synthetic construct
  misc_feature 1..25: note = Oligonucleotide
  source 1..25: mol_type = other DNA
gctcgggatacggcagcgggccgag

SEQ ID NO: 38674 - DNA, 25 bp, synthetic construct
  misc_feature 1..25: note = Oligonucleotide
  source 1..25: mol_type = other DNA
gccgctcgggatacggcagcgggcc

SEQ ID NO: 38675 - DNA, 25 bp, synthetic construct
  misc_feature 1..25: note = Oligonucleotide
  source 1..25: mol_type = other DNA
tctgccgctcgggatacggcagcgg

SEQ ID NO: 38676 - DNA, 25 bp, synthetic construct
  misc_feature 1..25: note = Oligonucleotide
  source 1..25: mol_type = other DNA
gcttctgccgctcgggatacggcag

SEQ ID NO: 38677 - DNA, 25 bp, synthetic construct
  misc_feature 1..25: note = Oligonucleotide
  source 1..25: mol_type = other DNA
cgcgcttctgccgctcgggatacgg

SEQ ID NO: 38678 - DNA, 25 bp, synthetic construct
  misc_feature 1..25: note = Oligonucleotide
  source 1..25: mol_type = other DNA
gcgcgcgcttctgccgctcgggata

SEQ ID NO: 38679 - DNA, 25 bp, synthetic construct
  misc_feature 1..25: note = Oligonucleotide
  source 1..25: mol_type = other DNA
agcgcgcgcgcttctgccgctcggg

SEQ ID NO: 38680 - DNA, 25 bp, synthetic construct
  misc_feature 1..25: note = Oligonucleotide
  source 1..25: mol_type = other DNA
tggagcgcgcgcgcttctgccgctc

SEQ ID NO: 38681 - DNA, 25 bp, synthetic construct
  misc_feature 1..25: note = Oligonucleotide
  source 1..25: mol_type = other DNA
tcatggagcgcgcgcgcttctgccg

SEQ ID NO: 38682 - DNA, 25 bp, synthetic construct
  misc_feature 1..25: note = Oligonucleotide
  source 1..25: mol_type = other DNA
tgatcatggagcgcgcgcgcttctg

SEQ ID NO: 38683 - DNA, 25 bp, synthetic construct
  misc_feature 1..25: note = Oligonucleotide
  source 1..25: mol_type = other DNA
ggatgatcatggagcgcgcgcgctt

SEQ ID NO: 38684 - DNA, 25 bp, synthetic construct
  misc_feature 1..25: note = Oligonucleotide
  source 1..25: mol_type = other DNA
gcaggatgatcatggagcgcgcgcg

SEQ ID NO: 38685 - DNA, 25 bp, synthetic construct
  misc_feature 1..25: note = Oligonucleotide
  source 1..25: mol_type = other DNA
cctgcaggatgatcatggagcgcgc

SEQ ID NO: 38686 - DNA, 25 bp, synthetic construct
  misc_feature 1..25: note = Oligonucleotide
  source 1..25: mol_type = other DNA
agtcctgcaggatgatcatggagcg

SEQ ID NO: 38687 - DNA, 25 bp, synthetic construct
  misc_feature 1..25: note = Oligonucleotide
  source 1..25: mol_type = other DNA
ccgagtcctgcaggatgatcatgga

SEQ ID NO: 38688 - DNA, 25 bp, synthetic construct
  misc_feature 1..25: note = Oligonucleotide
  source 1..25: mol_type = other DNA
gcgccgagtcctgcaggatgatcat

SEQ ID NO: 38689 - DNA, 25 bp, synthetic construct
  misc_feature 1..25: note = Oligonucleotide
  source 1..25: mol_type = other DNA
cgggcgccgagtcctgcaggatgat

SEQ ID NO: 38690 - DNA, 25 bp, synthetic construct
  misc_feature 1..25: note = Oligonucleotide
  source 1..25: mol_type = other DNA
actcgggcgccgagtcctgcaggat

SEQ ID NO: 38691 - DNA, 25 bp, synthetic construct
  misc_feature 1..25: note = Oligonucleotide
  source 1..25: mol_type = other DNA
ccgactcgggcgccgagtcctgcag

SEQ ID NO: 38692 - DNA, 25 bp, synthetic construct
  misc_feature 1..25: note = Oligonucleotide
  source 1..25: mol_type = other DNA
cgcccgactcgggcgccgagtcctg

SEQ ID NO: 38693 - DNA, 25 bp, synthetic construct
  misc_feature 1..25: note = Oligonucleotide
  source 1..25: mol_type = other DNA
cgtcgcccgactcgggcgccgagtc

SEQ ID NO: 38694 - DNA, 25 bp, synthetic construct
  misc_feature 1..25: note = Oligonucleotide
  source 1..25: mol_type = other DNA
gggcgtcgcccgactcgggcgccga

SEQ ID NO: 38695 - DNA, 25 bp, synthetic construct
  misc_feature 1..25: note = Oligonucleotide
  source 1..25: mol_type = other DNA
gaggggcgtcgcccgactcgggcgc

SEQ ID NO: 38696 - DNA, 25 bp, synthetic construct
  misc_feature 1..25: note = Oligonucleotide
  source 1..25: mol_type = other DNA
gtcgaggggcgtcgcccgactcggg

SEQ ID NO: 38697 - DNA, 25 bp, synthetic construct
  misc_feature 1..25: note = Oligonucleotide
  source 1..25: mol_type = other DNA
ggggtcgaggggcgtcgcccgactc

SEQ ID NO: 38698 - DNA, 25 bp, synthetic construct
  misc_feature 1..25: note = Oligonucleotide
  source 1..25: mol_type = other DNA
gcgggggtcgaggggcgtcgcccga

SEQ ID NO: 38699 - DNA, 25 bp, synthetic construct
  misc_feature 1..25: note = Oligonucleotide
  source 1..25: mol_type = other DNA
cgggcgggggtcgaggggcgtcgcc

SEQ ID NO: 38700 - DNA, 25 bp, synthetic construct
  misc_feature 1..25: note = Oligonucleotide
  source 1..25: mol_type = other DNA
ccgcgggcgggggtcgaggggcgtc

SEQ ID NO: 38701 - DNA, 25 bp, synthetic construct
  misc_feature 1..25: note = Oligonucleotide
  source 1..25: mol_type = other DNA
tggccgcgggcgggggtcgaggggc

SEQ ID NO: 38702 - DNA, 25 bp, synthetic construct
  misc_feature 1..25: note = Oligonucleotide
  source 1..25: mol_type = other DNA
gggtggccgcgggcgggggtcgagg

SEQ ID NO: 38703 - DNA, 25 bp, synthetic construct
  misc_feature 1..25: note = Oligonucleotide
  source 1..25: mol_type = other DNA
gcggggtggccgcgggcgggggtcg

SEQ ID NO: 38704 - DNA, 25 bp, synthetic construct
  misc_feature 1..25: note = Oligonucleotide
  source 1..25: mol_type = other DNA
cgggcggggtggccgcgggcggggg

SEQ ID NO: 38705 - DNA, 25 bp, synthetic construct
  misc_feature 1..25: note = Oligonucleotide
  source 1..25: mol_type = other DNA
gctcgggcggggtggccgcgggcgg

SEQ ID NO: 38706 - DNA, 25 bp, synthetic construct
  misc_feature 1..25: note = Oligonucleotide
  source 1..25: mol_type = other DNA
gtcgctcgggcggggtggccgcggg

SEQ ID NO: 38707 - DNA, 25 bp, synthetic construct
  misc_feature 1..25: note = Oligonucleotide
  source 1..25: mol_type = other DNA
tgggtcgctcgggcggggtggccgc

SEQ ID NO: 38708 - DNA, 25 bp, synthetic construct
  misc_feature 1..25: note = Oligonucleotide
  source 1..25: mol_type = other DNA
gcttgggtcgctcgggcggggtggc

SEQ ID NO: 38709 - DNA, 25 bp, synthetic construct
  misc_feature 1..25: note = Oligonucleotide
  source 1..25: mol_type = other DNA
ggcgcttgggtcgctcgggcggggt

SEQ ID NO: 38710 - DNA, 25 bp, synthetic construct
  misc_feature 1..25: note = Oligonucleotide
  source 1..25: mol_type = other DNA
gccggcgcttgggtcgctcgggcgg

SEQ ID NO: 38711 - DNA, 25 bp, synthetic construct
  misc_feature 1..25: note = Oligonucleotide
  source 1..25: mol_type = other DNA
gcggccggcgcttgggtcgctcggg

SEQ ID NO: 38712 - DNA, 25 bp, synthetic construct
  misc_feature 1..25: note = Oligonucleotide
  source 1..25: mol_type = other DNA
gccgcggccggcgcttgggtcgctc

SEQ ID NO: 38713 - DNA, 25 bp, synthetic construct
  misc_feature 1..25: note = Oligonucleotide
  source 1..25: mol_type = other DNA
gcggccgcggccggcgcttgggtcg

SEQ ID NO: 38714 - DNA, 25 bp, synthetic construct
  misc_feature 1..25: note = Oligonucleotide
  source 1..25: mol_type = other DNA
cgggcggccgcggccggcgcttggg

SEQ ID NO: 38715 - DNA, 25 bp, synthetic construct
  misc_feature 1..25: note = Oligonucleotide
  source 1..25: mol_type = other DNA
ggccgggcggccgcggccggcgctt

SEQ ID NO: 38716 - DNA, 25 bp, synthetic construct
  misc_feature 1..25: note = Oligonucleotide
  source 1..25: mol_type = other DNA
cggggccgggcggccgcggccggcg

SEQ ID NO: 38717 - DNA, 25 bp, synthetic construct
  misc_feature 1..25: note = Oligonucleotide
  source 1..25: mol_type = other DNA
tgtcggggccgggcggccgcggccg

SEQ ID NO: 38718 - DNA, 25 bp, synthetic construct
  misc_feature 1..25: note = Oligonucleotide
  source 1..25: mol_type = other DNA
ggctgtcggggccgggcggccgcgg

SEQ ID NO: 38719 - DNA, 25 bp, synthetic construct
  misc_feature 1..25: note = Oligonucleotide
  source 1..25: mol_type = other DNA
aggggctgtcggggccgggcggccg

SEQ ID NO: 38720 - DNA, 25 bp, synthetic construct
  misc_feature 1..25: note = Oligonucleotide
  source 1..25: mol_type = other DNA
cgtaggggctgtcggggccgggcgg

SEQ ID NO: 38721 - DNA, 25 bp, synthetic construct
  misc_feature 1..25: note = Oligonucleotide
  source 1..25: mol_type = other DNA
tggcgtaggggctgtcggggccggg

SEQ ID NO: 38722 - DNA, 25 bp, synthetic construct
  misc_feature 1..25: note = Oligonucleotide
  source 1..25: mol_type = other DNA
ggttggcgtaggggctgtcggggcc

SEQ ID NO: 38723 - DNA, 25 bp, synthetic construct
  misc_feature 1..25: note = Oligonucleotide
  source 1..25: mol_type = other DNA
ccaggttggcgtaggggctgtcggg

SEQ ID NO: 38724 - DNA, 25 bp, synthetic construct
  misc_feature 1..25: note = Oligonucleotide
  source 1..25: mol_type = other DNA
cgcccaggttggcgtaggggctgtc

SEQ ID NO: 38725 - DNA, 25 bp, synthetic construct
  misc_feature 1..25: note = Oligonucleotide
  source 1..25: mol_type = other DNA
aggcgcccaggttggcgtaggggct

SEQ ID NO: 38726 - DNA, 25 bp, synthetic construct
  misc_feature 1..25: note = Oligonucleotide
  source 1..25: mol_type = other DNA
tgaaggcgcccaggttggcgtaggg

SEQ ID NO: 38727 - DNA, 25 bp, synthetic construct
  misc_feature 1..25: note = Oligonucleotide
  source 1..25: mol_type = other DNA
cgctgaaggcgcccaggttggcgta

SEQ ID NO: 38728 - DNA, 25 bp, synthetic construct
  misc_feature 1..25: note = Oligonucleotide
  source 1..25: mol_type = other DNA
tggcgctgaaggcgcccaggttggc

SEQ ID NO: 38729 - DNA, 25 bp, synthetic construct
  misc_feature 1..25: note = Oligonucleotide
  source 1..25: mol_type = other DNA
ggctggcgctgaaggcgcccaggtt

SEQ ID NO: 38730 - DNA, 25 bp, synthetic construct
  misc_feature 1..25: note = Oligonucleotide
  source 1..25: mol_type = other DNA
agaggctggcgctgaaggcgcccag

SEQ ID NO: 38731 - DNA, 25 bp, synthetic construct
  misc_feature 1..25: note = Oligonucleotide
  source 1..25: mol_type = other DNA
cgaagaggctggcgctgaaggcgcc

SEQ ID NO: 38732 - DNA, 25 bp, synthetic construct
  misc_feature 1..25: note = Oligonucleotide
  source 1..25: mol_type = other DNA
gagcgaagaggctggcgctgaaggc

SEQ ID NO: 38733 - DNA, 25 bp, synthetic construct
  misc_feature 1..25: note = Oligonucleotide
  source 1..25: mol_type = other DNA
acggagcgaagaggctggcgctgaa

SEQ ID NO: 38734 - DNA, 25 bp, synthetic construct
  misc_feature 1..25: note = Oligonucleotide
  source 1..25: mol_type = other DNA
tggacggagcgaagaggctggcgct

SEQ ID NO: 38735 - DNA, 25 bp, synthetic construct
  misc_feature 1..25: note = Oligonucleotide
  source 1..25: mol_type = other DNA
gcttggacggagcgaagaggctggc

SEQ ID NO: 38736 - DNA, 25 bp, synthetic construct
  misc_feature 1..25: note = Oligonucleotide
  source 1..25: mol_type = other DNA
gcggcttggacggagcgaagaggct

SEQ ID NO: 38737 - DNA, 25 bp, synthetic construct
  misc_feature 1..25: note = Oligonucleotide
  source 1..25: mol_type = other DNA
gctgcggcttggacggagcgaagag

SEQ ID NO: 38738 - DNA, 25 bp, synthetic construct
  misc_feature 1..25: note = Oligonucleotide
  source 1..25: mol_type = other DNA
ggcgctgcggcttggacggagcgaa

SEQ ID NO: 38739 - DNA, 25 bp, synthetic construct
  misc_feature 1..25: note = Oligonucleotide
  source 1..25: mol_type = other DNA
tgcggcgctgcggcttggacggagc

SEQ ID NO: 38740 - DNA, 25 bp, synthetic construct
  misc_feature 1..25: note = Oligonucleotide
  source 1..25: mol_type = other DNA
tcttgcggcgctgcggcttggacgg

SEQ ID NO: 38741 - DNA, 25 bp, synthetic construct
  misc_feature 1..25: note = Oligonucleotide
  source 1..25: mol_type = other DNA
ggctcttgcggcgctgcggcttgga

SEQ ID NO: 38742 - DNA, 25 bp, synthetic construct
  misc_feature 1..25: note = Oligonucleotide
  source 1..25: mol_type = other DNA
gggggctcttgcggcgctgcggctt

SEQ ID NO: 38743 - DNA, 25 bp, synthetic construct
  misc_feature 1..25: note = Oligonucleotide
  source 1..25: mol_type = other DNA
ccagggggctcttgcggcgctgcgg

SEQ ID NO: 38744 - DNA, 25 bp, synthetic construct
  misc_feature 1..25: note = Oligonucleotide
  source 1..25: mol_type = other DNA
tcaccagggggctcttgcggcgctg

SEQ ID NO: 38745 - DNA, 25 bp, synthetic construct
  misc_feature 1..25: note = Oligonucleotide
  source 1..25: mol_type = other DNA
gcttcaccagggggctcttgcggcg

SEQ ID NO: 38746 - DNA, 25 bp, synthetic construct
  misc_feature 1..25: note = Oligonucleotide
  source 1..25: mol_type = other DNA
gctgcttcaccagggggctcttgcg

SEQ ID NO: 38747 - DNA, 25 bp, synthetic construct
  misc_feature 1..25: note = Oligonucleotide
  source 1..25: mol_type = other DNA
gcagctgcttcaccagggggctctt

SEQ ID NO: 38748 - DNA, 25 bp, synthetic construct
  misc_feature 1..25: note = Oligonucleotide
  source 1..25: mol_type = other DNA
cctgcagctgcttcaccagggggct

SEQ ID NO: 38749 - DNA, 25 bp, synthetic construct
  misc_feature 1..25: note = Oligonucleotide
  source 1..25: mol_type = other DNA
ccacctgcagctgcttcaccagggg

SEQ ID NO: 38750 - DNA, 25 bp, synthetic construct
  misc_feature 1..25: note = Oligonucleotide
  source 1..25: mol_type = other DNA
cctccacctgcagctgcttcaccag

SEQ ID NO: 38751 - DNA, 25 bp, synthetic construct
  misc_feature 1..25: note = Oligonucleotide
  source 1..25: mol_type = other DNA
cgtcctccacctgcagctgcttcac

SEQ ID NO: 38752 - DNA, 25 bp, synthetic construct
  misc_feature 1..25: note = Oligonucleotide
  source 1..25: mol_type = other DNA
gcgcgtcctccacctgcagctgctt

SEQ ID NO: 38753 - DNA, 25 bp, synthetic construct
  misc_feature 1..25: note = Oligonucleotide
  source 1..25: mol_type = other DNA
cctgcgcgtcctccacctgcagctg

SEQ ID NO: 38754 - DNA, 25 bp, synthetic construct
  misc_feature 1..25: note = Oligonucleotide
  source 1..25: mol_type = other DNA
gctcctgcgcgtcctccacctgcag

SEQ ID NO: 38755 - DNA, 25 bp, synthetic construct
  misc_feature 1..25: note = Oligonucleotide
  source 1..25: mol_type = other DNA
cgcgctcctgcgcgtcctccacctg

SEQ ID NO: 38756 - DNA, 25 bp, synthetic construct
  misc_feature 1..25: note = Oligonucleotide
  source 1..25: mol_type = other DNA
ccgcgcgctcctgcgcgtcctccac

SEQ ID NO: 38757 - DNA, 25 bp, synthetic construct
  misc_feature 1..25: note = Oligonucleotide
  source 1..25: mol_type = other DNA
gggccgcgcgctcctgcgcgtcctc

SEQ ID NO: 38758 - DNA, 25 bp, synthetic construct
  misc_feature 1..25: note = Oligonucleotide
  source 1..25: mol_type = other DNA
ccagggccgcgcgctcctgcgcgtc

SEQ ID NO: 38759 - DNA, 25 bp, synthetic construct
  misc_feature 1..25: note = Oligonucleotide
  source 1..25: mol_type = other DNA
cggccagggccgcgcgctcctgcgc

SEQ ID NO: 38760 - DNA, 25 bp, synthetic construct
  misc_feature 1..25: note = Oligonucleotide
  source 1..25: mol_type = other DNA
ccacggccagggccgcgcgctcctg

SEQ ID NO: 38761 - DNA, 25 bp, synthetic construct
  misc_feature 1..25: note = Oligonucleotide
  source 1..25: mol_type = other DNA
tgcccacggccagggccgcgcgctc

SEQ ID NO: 38762 - DNA, 25 bp, synthetic construct
  misc_feature 1..25: note = Oligonucleotide
  source 1..25: mol_type = other DNA
ggctgcccacggccagggccgcgcg

SEQ ID NO: 38763 - DNA, 25 bp, synthetic construct
  misc_feature 1..25: note = Oligonucleotide
  source 1..25: mol_type = other DNA
cggggctgcccacggccagggccgc

SEQ ID NO: 38764 - DNA, 25 bp, synthetic construct
  misc_feature 1..25: note = Oligonucleotide
  source 1..25: mol_type = other DNA
gaccggggctgcccacggccagggc

SEQ ID NO: 38765 - DNA, 25 bp, synthetic construct
  misc_feature 1..25: note = Oligonucleotide
  source 1..25: mol_type = other DNA
cgggaccggggctgcccacggccag

SEQ ID NO: 38766 - DNA, 25 bp, synthetic construct
  misc_feature 1..25: note = Oligonucleotide
  source 1..25: mol_type = other DNA
cgccgggaccggggctgcccacggc

SEQ ID NO: 38767 - DNA, 25 bp, synthetic construct
  misc_feature 1..25: note = Oligonucleotide
  source 1..25: mol_type = other DNA
cgccgccgggaccggggctgcccac

SEQ ID NO: 38768 - DNA, 25 bp, synthetic construct
  misc_feature 1..25: note = Oligonucleotide
  source 1..25: mol_type = other DNA
tgccgccgccgggaccggggctgcc

SEQ ID NO: 38769 - DNA, 25 bp, synthetic construct
  misc_feature 1..25: note = Oligonucleotide
  source 1..25: mol_type = other DNA
agctgccgccgccgggaccggggct

SEQ ID NO: 38770 - DNA, 25 bp, synthetic construct
  misc_feature 1..25: note = Oligonucleotide
  source 1..25: mol_type = other DNA
cgaagctgccgccgccgggaccggg

SEQ ID NO: 38771 - DNA, 25 bp, synthetic construct
  misc_feature 1..25: note = Oligonucleotide
  source 1..25: mol_type = other DNA
gggcgaagctgccgccgccgggacc

SEQ ID NO: 38772 - DNA, 25 bp, synthetic construct
  misc_feature 1..25: note = Oligonucleotide
  source 1..25: mol_type = other DNA
cgcgggcgaagctgccgccgccggg

SEQ ID NO: 38773 - DNA, 25 bp, synthetic construct
  misc_feature 1..25: note = Oligonucleotide
  source 1..25: mol_type = other DNA
gctcgcgggcgaagctgccgccgcc

SEQ ID NO: 38774 - DNA, 25 bp, synthetic construct
  misc_feature 1..25: note = Oligonucleotide
  source 1..25: mol_type = other DNA
agggctcgcgggcgaagctgccgcc

SEQ ID NO: 38775 - DNA, 25 bp, synthetic construct
  misc_feature 1..25: note = Oligonucleotide
  source 1..25: mol_type = other DNA
gggagggctcgcgggcgaagctgcc

SEQ ID NO: 38776 - DNA, 25 bp, synthetic construct
  misc_feature 1..25: note = Oligonucleotide
  source 1..25: mol_type = other DNA
tcggggagggctcgcgggcgaagct

SEQ ID NO: 38777 - DNA, 25 bp, synthetic construct
  misc_feature 1..25: note = Oligonucleotide
  source 1..25: mol_type = other DNA
gggtcggggagggctcgcgggcgaa

SEQ ID NO: 38778 - DNA, 25 bp, synthetic construct
  misc_feature 1..25: note = Oligonucleotide
  source 1..25: mol_type = other DNA
ggtgggtcggggagggctcgcgggc

SEQ ID NO: 38779 - DNA, 25 bp, synthetic construct
  misc_feature 1..25: note = Oligonucleotide
  source 1..25: mol_type = other DNA
cgcggtgggtcggggagggctcgcg

SEQ ID NO: 38780 - DNA, 25 bp, synthetic construct
  misc_feature 1..25: note = Oligonucleotide
  source 1..25: mol_type = other DNA
gaccgcggtgggtcggggagggctc

SEQ ID NO: 38781 - DNA, 25 bp, synthetic construct
  misc_feature 1..25: note = Oligonucleotide
  source 1..25: mol_type = other DNA
gcggaccgcggtgggtcggggaggg

SEQ ID NO: 38782 - DNA, 25 bp, synthetic construct
  misc_feature 1..25: note = Oligonucleotide
  source 1..25: mol_type = other DNA
ggcgcggaccgcggtgggtcgggga

SEQ ID NO: 38783 - DNA, 25 bp, synthetic construct
  misc_feature 1..25: note = Oligonucleotide
  source 1..25: mol_type = other DNA
ccgggcgcggaccgcggtgggtcgg

SEQ ID NO: 38784 - DNA, 25 bp, synthetic construct
  misc_feature 1..25: note = Oligonucleotide
  source 1..25: mol_type = other DNA
cacccgggcgcggaccgcggtgggt

SEQ ID NO: 38785 - DNA, 25 bp, synthetic construct
  misc_feature 1..25: note = Oligonucleotide
  source 1..25: mol_type = other DNA
ggccacccgggcgcggaccgcggtg

SEQ ID NO: 38786 - DNA, 25 bp, synthetic construct
  misc_feature 1..25: note = Oligonucleotide
  source 1..25: mol_type = other DNA
cgaggccacccgggcgcggaccgcg

SEQ ID NO: 38787 - DNA, 25 bp, synthetic construct
  misc_feature 1..25: note = Oligonucleotide
  source 1..25: mol_type = other DNA
agtcgaggccacccgggcgcggacc

SEQ ID NO: 38788 - DNA, 25 bp, synthetic construct
  misc_feature 1..25: note = Oligonucleotide
  source 1..25: mol_type = other DNA
cgtagtcgaggccacccgggcgcgg

SEQ ID NO: 38789 - DNA, 25 bp, synthetic construct
  misc_feature 1..25: note = Oligonucleotide
  source 1..25: mol_type = other DNA
cgccgtagtcgaggccacccgggcg

SEQ ID NO: 38790 - DNA, 25 bp, synthetic construct
  misc_feature 1..25: note = Oligonucleotide
  source 1..25: mol_type = other DNA
ccgcgccgtagtcgaggccacccgg

SEQ ID NO: 38791 - DNA, 25 bp, synthetic construct
  misc_feature 1..25: note = Oligonucleotide
  source 1..25: mol_type = other DNA
cgcccgcgccgtagtcgaggccacc

SEQ ID NO: 38792 - DNA, 25 bp, synthetic construct
  misc_feature 1..25: note = Oligonucleotide
  source 1..25: mol_type = other DNA
catcgcccgcgccgtagtcgaggcc

SEQ ID NO: 38793 - DNA, 25 bp, synthetic construct
  misc_feature 1..25: note = Oligonucleotide
  source 1..25: mol_type = other DNA
ggccatcgcccgcgccgtagtcgag

SEQ ID NO: 38794 - DNA, 25 bp, synthetic construct
  misc_feature 1..25: note = Oligonucleotide
  source 1..25: mol_type = other DNA
ccgggccatcgcccgcgccgtagtc

SEQ ID NO: 38795 - DNA, 25 bp, synthetic construct
  misc_feature 1..25: note = Oligonucleotide
  source 1..25: mol_type = other DNA
gccccgggccatcgcccgcgccgta

SEQ ID NO: 38796 - DNA, 25 bp, synthetic construct
  misc_feature 1..25: note = Oligonucleotide
  source 1..25: mol_type = other DNA
cgagccccgggccatcgcccgcgcc

SEQ ID NO: 38797 - DNA, 25 bp, synthetic construct
  misc_feature 1..25: note = Oligonucleotide
  source 1..25: mol_type = other DNA
acgcgagccccgggccatcgcccgc

SEQ ID NO: 38798 - DNA, 25 bp, synthetic construct
  misc_feature 1..25: note = Oligonucleotide
  source 1..25: mol_type = other DNA
cgaacgcgagccccgggccatcgcc

SEQ ID NO: 38799 - DNA, 25 bp, synthetic construct
  misc_feature 1..25: note = Oligonucleotide
  source 1..25: mol_type = other DNA
cgccgaacgcgagccccgggccatc

SEQ ID NO: 38800 - DNA, 25 bp, synthetic construct
  misc_feature 1..25: note = Oligonucleotide
  source 1..25: mol_type = other DNA
ggccgccgaacgcgagccccgggcc

SEQ ID NO: 38801 - DNA, 25 bp, synthetic construct
  misc_feature 1..25: note = Oligonucleotide
  source 1..25: mol_type = other DNA
ccgggccgccgaacgcgagccccgg

SEQ ID NO: 38802 - DNA, 25 bp, synthetic construct
  misc_feature 1..25: note = Oligonucleotide
  source 1..25: mol_type = other DNA
ggcccgggccgccgaacgcgagccc

SEQ ID NO: 38803 - DNA, 25 bp, synthetic construct
  misc_feature 1..25: note = Oligonucleotide
  source 1..25: mol_type = other DNA
ccgggcccgggccgccgaacgcgag

SEQ ID NO: 38804 - DNA, 25 bp, synthetic construct
  misc_feature 1..25: note = Oligonucleotide
  source 1..25: mol_type = other DNA
tggccgggcccgggccgccgaacgc

SEQ ID NO: 38805 - DNA, 25 bp, synthetic construct
  misc_feature 1..25: note = Oligonucleotide
  source 1..25: mol_type = other DNA
ccttggccgggcccgggccgccgaa

SEQ ID NO: 38806 - DNA, 25 bp, synthetic construct
  misc_feature 1..25: note = Oligonucleotide
  source 1..25: mol_type = other DNA
ggtccttggccgggcccgggccgcc

SEQ ID NO: 38807 - DNA, 25 bp, synthetic construct
  misc_feature 1..25: note = Oligonucleotide
  source 1..25: mol_type = other DNA
gccggtccttggccgggcccgggcc

SEQ ID NO: 38808 - DNA, 25 bp, synthetic construct
  misc_feature 1..25: note = Oligonucleotide
  source 1..25: mol_type = other DNA
gccgccggtccttggccgggcccgg

SEQ ID NO: 38809 - DNA, 25 bp, synthetic construct
  misc_feature 1..25: note = Oligonucleotide
  source 1..25: mol_type = other DNA
ccagccgccggtccttggccgggcc

SEQ ID NO: 38810 - DNA, 25 bp, synthetic construct
  misc_feature 1..25: note = Oligonucleotide
  source 1..25: mol_type = other DNA
cctccagccgccggtccttggccgg

SEQ ID NO: 38811 - DNA, 25 bp, synthetic construct
  misc_feature 1..25: note = Oligonucleotide
  source 1..25: mol_type = other DNA
gctcctccagccgccggtccttggc

SEQ ID NO: 38812 - DNA, 25 bp, synthetic construct
  misc_feature 1..25: note = Oligonucleotide
  source 1..25: mol_type = other DNA
gccgctcctccagccgccggtcctt

SEQ ID NO: 38813 - DNA, 25 bp, synthetic construct
  misc_feature 1..25: note = Oligonucleotide
  source 1..25: mol_type = other DNA
ggcgccgctcctccagccgccggtc

SEQ ID NO: 38814 - DNA, 25 bp, synthetic construct
  misc_feature 1..25: note = Oligonucleotide
  source 1..25: mol_type = other DNA
agcggcgccgctcctccagccgccg

SEQ ID NO: 38815 - DNA, 25 bp, synthetic construct
  misc_feature 1..25: note = Oligonucleotide
  source 1..25: mol_type = other DNA
tggagcggcgccgctcctccagccg

SEQ ID NO: 38816 - DNA, 25 bp, synthetic construct
  misc_feature 1..25: note = Oligonucleotide
  source 1..25: mol_type = other DNA
cagtggagcggcgccgctcctccag

SEQ ID NO: 38817 - DNA, 25 bp, synthetic construct
  misc_feature 1..25: note = Oligonucleotide
  source 1..25: mol_type = other DNA
acacagtggagcggcgccgctcctc

SEQ ID NO: 38818 - DNA, 25 bp, synthetic construct
  misc_feature 1..25: note = Oligonucleotide
  source 1..25: mol_type = other DNA
ggaacacagtggagcggcgccgctc

SEQ ID NO: 38819 - DNA, 25 bp, synthetic construct
  misc_feature 1..25: note = Oligonucleotide
  source 1..25: mol_type = other DNA
acaggaacacagtggagcggcgccg

SEQ ID NO: 38820 - DNA, 25 bp, synthetic construct
  misc_feature 1..25: note = Oligonucleotide
  source 1..25: mol_type = other DNA
cggacaggaacacagtggagcggcg

SEQ ID NO: 38821 - DNA, 25 bp, synthetic construct
  misc_feature 1..25: note = Oligonucleotide
  source 1..25: mol_type = other DNA
ccacggacaggaacacagtggagcg

SEQ ID NO: 38822 - DNA, 25 bp, synthetic construct
  misc_feature 1..25: note = Oligonucleotide
  source 1..25: mol_type = other DNA
cccccacggacaggaacacagtgga

SEQ ID NO: 38823 - DNA, 25 bp, synthetic construct
  misc_feature 1..25: note = Oligonucleotide
  source 1..25: mol_type = other DNA
tggcccccacggacaggaacacagt

SEQ ID NO: 38824 - DNA, 25 bp, synthetic construct
  misc_feature 1..25: note = Oligonucleotide
  source 1..25: mol_type = other DNA
cgatggcccccacggacaggaacac

SEQ ID NO: 38825 - DNA, 25 bp, synthetic construct
  misc_feature 1..25: note = Oligonucleotide
  source 1..25: mol_type = other DNA
cctcgatggcccccacggacaggaa

SEQ ID NO: 38826 - DNA, 25 bp, synthetic construct
  misc_feature 1..25: note = Oligonucleotide
  source 1..25: mol_type = other DNA
tgccctcgatggcccccacggacag

SEQ ID NO: 38827 - DNA, 25 bp, synthetic construct
  misc_feature 1..25: note = Oligonucleotide
  source 1..25: mol_type = other DNA
cgctgccctcgatggcccccacgga

SEQ ID NO: 38828 - DNA, 25 bp, synthetic construct
  misc_feature 1..25: note = Oligonucleotide
  source 1..25: mol_type = other DNA
gggcgctgccctcgatggcccccac

SEQ ID NO: 38829 - DNA, 25 bp, synthetic construct
  misc_feature 1..25: note = Oligonucleotide
  source 1..25: mol_type = other DNA
cgggggcgctgccctcgatggcccc

SEQ ID NO: 38830 - DNA, 25 bp, synthetic construct
  misc_feature 1..25: note = Oligonucleotide
  source 1..25: mol_type = other DNA
cgccgggggcgctgccctcgatggc

SEQ ID NO: 38831 - DNA, 25 bp, synthetic construct
  misc_feature 1..25: note = Oligonucleotide
  source 1..25: mol_type = other DNA
ccgcgccgggggcgctgccctcgat

SEQ ID NO: 38832 - DNA, 25 bp, synthetic construct
  misc_feature 1..25: note = Oligonucleotide
  source 1..25: mol_type = other DNA
gatccgcgccgggggcgctgccctc

SEQ ID NO: 38833 - DNA, 25 bp, synthetic construct
  misc_feature 1..25: note = Oligonucleotide
  source 1..25: mol_type = other DNA
gcagatccgcgccgggggcgctgcc

SEQ ID NO: 38834 - DNA, 25 bp, synthetic construct
  misc_feature 1..25: note = Oligonucleotide
  source 1..25: mol_type = other DNA
atggcagatccgcgccgggggcgct

SEQ ID NO: 38835 - DNA, 25 bp, synthetic construct
  misc_feature 1..25: note = Oligonucleotide
  source 1..25: mol_type = other DNA
gggatggcagatccgcgccgggggc

SEQ ID NO: 38836 - DNA, 25 bp, synthetic construct
  misc_feature 1..25: note = Oligonucleotide
  source 1..25: mol_type = other DNA
gtagggatggcagatccgcgccggg

SEQ ID NO: 38837 - DNA, 25 bp, synthetic construct
  misc_feature 1..25: note = Oligonucleotide
  source 1..25: mol_type = other DNA
gctgtagggatggcagatccgcgcc

SEQ ID NO: 38838 - DNA, 25 bp, synthetic construct
  misc_feature 1..25: note = Oligonucleotide
  source 1..25: mol_type = other DNA
agggctgtagggatggcagatccgc

SEQ ID NO: 38839 - DNA, 25 bp, synthetic construct
  misc_feature 1..25: note = Oligonucleotide
  source 1..25: mol_type = other DNA
gggagggctgtagggatggcagatc

SEQ ID NO: 38840 - DNA, 25 bp, synthetic construct
  misc_feature 1..25: note = Oligonucleotide
  source 1..25: mol_type = other DNA
agcgggagggctgtagggatggcag

SEQ ID NO: 38841 - DNA, 25 bp, synthetic construct
  misc_feature 1..25: note = Oligonucleotide
  source 1..25: mol_type = other DNA
tggagcgggagggctgtagggatgg

SEQ ID NO: 38842 - DNA, 25 bp, synthetic construct
  misc_feature 1..25: note = Oligonucleotide
  source 1..25: mol_type = other DNA
cgatggagcgggagggctgtaggga

SEQ ID NO: 38843 - DNA, 25 bp, synthetic construct
  misc_feature 1..25: note = Oligonucleotide
  source 1..25: mol_type = other DNA
cgtcgatggagcgggagggctgtag

SEQ ID NO: 38844 - DNA, 25 bp, synthetic construct
  misc_feature 1..25: note = Oligonucleotide
  source 1..25: mol_type = other DNA
gctcgtcgatggagcgggagggctg

SEQ ID NO: 38845 - DNA, 25 bp, synthetic construct
  misc_feature 1..25: note = Oligonucleotide
  source 1..25: mol_type = other DNA
ggcgctcgtcgatggagcgggaggg

SEQ ID NO: 38846 - DNA, 25 bp, synthetic construct
  misc_feature 1..25: note = Oligonucleotide
  source 1..25: mol_type = other DNA
ggaggcgctcgtcgatggagcggga

SEQ ID NO: 38847 - DNA, 25 bp, synthetic construct
  misc_feature 1..25: note = Oligonucleotide
  source 1..25: mol_type = other DNA
ccaggaggcgctcgtcgatggagcg

SEQ ID NO: 38848 - DNA, 25 bp, synthetic construct
  misc_feature 1..25: note = Oligonucleotide
  source 1..25: mol_type = other DNA
tccccaggaggcgctcgtcgatgga

SEQ ID NO: 38849 - DNA, 25 bp, synthetic construct
  misc_feature 1..25: note = Oligonucleotide
  source 1..25: mol_type = other DNA
cggtccccaggaggcgctcgtcgat

SEQ ID NO: 38850 - DNA, 25 bp, synthetic construct
  misc_feature 1..25: note = Oligonucleotide
  source 1..25: mol_type = other DNA
ggccggtccccaggaggcgctcgtc

SEQ ID NO: 38851 - DNA, 25 bp, synthetic construct
  misc_feature 1..25: note = Oligonucleotide
  source 1..25: mol_type = other DNA
tggggccggtccccaggaggcgctc

SEQ ID NO: 38852 - DNA, 25 bp, synthetic construct
  misc_feature 1..25: note = Oligonucleotide
  source 1..25: mol_type = other DNA
cggtggggccggtccccaggaggcg

SEQ ID NO: 38853 - DNA, 25 bp, synthetic construct
  misc_feature 1..25: note = Oligonucleotide
  source 1..25: mol_type = other DNA
cggcggtggggccggtccccaggag

SEQ ID NO: 38854 - DNA, 25 bp, synthetic construct
  misc_feature 1..25: note = Oligonucleotide
  source 1..25: mol_type = other DNA
ggccggcggtggggccggtccccag

SEQ ID NO: 38855 - DNA, 25 bp, synthetic construct
  misc_feature 1..25: note = Oligonucleotide
  source 1..25: mol_type = other DNA
cgcggccggcggtggggccggtccc

SEQ ID NO: 38856 - DNA, 25 bp, synthetic construct
  misc_feature 1..25: note = Oligonucleotide
  source 1..25: mol_type = other DNA
ggtcgcggccggcggtggggccggt

SEQ ID NO: 38857 - DNA, 25 bp, synthetic construct
  misc_feature 1..25: note = Oligonucleotide
  source 1..25: mol_type = other DNA
gcaggtcgcggccggcggtggggcc

SEQ ID NO: 38858 - DNA, 25 bp, synthetic construct
  misc_feature 1..25: note = Oligonucleotide
  source 1..25: mol_type = other DNA
gcagcaggtcgcggccggcggtggg

SEQ ID NO: 38859 - DNA, 25 bp, synthetic construct
  misc_feature 1..25: note = Oligonucleotide
  source 1..25: mol_type = other DNA
gcagcagcaggtcgcggccggcggt

SEQ ID NO: 38860 - DNA, 25 bp, synthetic construct
  misc_feature 1..25: note = Oligonucleotide
  source 1..25: mol_type = other DNA
agggcagcagcaggtcgcggccggc

SEQ ID NO: 38861 - DNA, 25 bp, synthetic construct
  misc_feature 1..25: note = Oligonucleotide
  source 1..25: mol_type = other DNA
gggagggcagcagcaggtcgcggcc

SEQ ID NO: 38862 - DNA, 25 bp, synthetic construct
  misc_feature 1..25: note = Oligonucleotide
  source 1..25: mol_type = other DNA
ccggggagggcagcagcaggtcgcg

SEQ ID NO: 38863 - DNA, 25 bp, synthetic construct
  misc_feature 1..25: note = Oligonucleotide
  source 1..25: mol_type = other DNA
acaccggggagggcagcagcaggtc

SEQ ID NO: 38864 - DNA, 25 bp, synthetic construct
  misc_feature 1..25: note = Oligonucleotide
  source 1..25: mol_type = other DNA
cagacaccggggagggcagcagcag

SEQ ID NO: 38865 - DNA, 25 bp, synthetic construct
  misc_feature 1..25: note = Oligonucleotide
  source 1..25: mol_type = other DNA
gggcagacaccggggagggcagcag

SEQ ID NO: 38866 - DNA, 25 bp, synthetic construct
  misc_feature 1..25: note = Oligonucleotide
  source 1..25: mol_type = other DNA
tcagggcagacaccggggagggcag

SEQ ID NO: 38867 - DNA, 25 bp, synthetic construct
  misc_feature 1..25: note = Oligonucleotide
  source 1..25: mol_type = other DNA
gcttcagggcagacaccggggaggg

SEQ ID NO: 38868 - DNA, 25 bp, synthetic construct
  misc_feature 1..25: note = Oligonucleotide
  source 1..25: mol_type = other DNA
acggcttcagggcagacaccgggga

SEQ ID NO: 38869 - DNA, 25 bp, synthetic construct
  misc_feature 1..25: note = Oligonucleotide
  source 1..25: mol_type = other DNA
ccaacggcttcagggcagacaccgg

SEQ ID NO: 38870 - DNA, 25 bp, synthetic construct
  misc_feature 1..25: note = Oligonucleotide
  source 1..25: mol_type = other DNA
tgaccaacggcttcagggcagacac

SEQ ID NO: 38871 - DNA, 25 bp, synthetic construct
  misc_feature 1..25: note = Oligonucleotide
  source 1..25: mol_type = other DNA
cgctgaccaacggcttcagggcaga

SEQ ID NO: 38872 - DNA, 25 bp, synthetic construct
  misc_feature 1..25: note = Oligonucleotide
  source 1..25: mol_type = other DNA
ggccgctgaccaacggcttcagggc

SEQ ID NO: 38873 - DNA, 25 bp, synthetic construct
  misc_feature 1..25: note = Oligonucleotide
  source 1..25: mol_type = other DNA
tcgggccgctgaccaacggcttcag

SEQ ID NO: 38874 - DNA, 25 bp, synthetic construct
  misc_feature 1..25: note = Oligonucleotide
  source 1..25: mol_type = other DNA
ggctcgggccgctgaccaacggctt

SEQ ID NO: 38875 - DNA, 25 bp, synthetic construct
  misc_feature 1..25: note = Oligonucleotide
  source 1..25: mol_type = other DNA
ccaggctcgggccgctgaccaacgg

SEQ ID NO: 38876 - DNA, 25 bp, synthetic construct
  misc_feature 1..25: note = Oligonucleotide
  source 1..25: mol_type = other DNA
gccccaggctcgggccgctgaccaa

SEQ ID NO: 38877 - DNA, 25 bp, synthetic construct
  misc_feature 1..25: note = Oligonucleotide
  source 1..25: mol_type = other DNA
agggccccaggctcgggccgctgac

SEQ ID NO: 38878 - DNA, 25 bp, synthetic construct
  misc_feature 1..25: note = Oligonucleotide
  source 1..25: mol_type = other DNA
ccgagggccccaggctcgggccgct

SEQ ID NO: 38879 - DNA, 25 bp, synthetic construct
  misc_feature 1..25: note = Oligonucleotide
  source 1..25: mol_type = other DNA
aacccgagggccccaggctcgggcc

SEQ ID NO: 38880 - DNA, 25 bp, synthetic construct
  misc_feature 1..25: note = Oligonucleotide
  source 1..25: mol_type = other DNA
tggaacccgagggccccaggctcgg

SEQ ID NO: 38881 - DNA, 25 bp, synthetic construct
  misc_feature 1..25: note = Oligonucleotide
  source 1..25: mol_type = other DNA
aggtggaacccgagggccccaggct

SEQ ID NO: 38882 - DNA, 25 bp, synthetic construct
  misc_feature 1..25: note = Oligonucleotide
  source 1..25: mol_type = other DNA
tgaaggtggaacccgagggccccag

SEQ ID NO: 38883 - DNA, 25 bp, synthetic construct
  misc_feature 1..25: note = Oligonucleotide
  source 1..25: mol_type = other DNA
ggatgaaggtggaacccgagggccc

SEQ ID NO: 38884 - DNA, 25 bp, synthetic construct
  misc_feature 1..25: note = Oligonucleotide
  source 1..25: mol_type = other DNA
ggtggatgaaggtggaacccgaggg

SEQ ID NO: 38885 - DNA, 25 bp, synthetic construct
  misc_feature 1..25: note = Oligonucleotide
  source 1..25: mol_type = other DNA
gtgggtggatgaaggtggaacccga

SEQ ID NO: 38886 - DNA, 25 bp, synthetic construct
  misc_feature 1..25: note = Oligonucleotide
  source 1..25: mol_type = other DNA
tgagtgggtggatgaaggtggaacc

SEQ ID NO: 38887 - DNA, 25 bp, synthetic construct
  misc_feature 1..25: note = Oligonucleotide
  source 1..25: mol_type = other DNA
cggtgagtgggtggatgaaggtgga

SEQ ID NO: 38888 - DNA, 25 bp, synthetic construct
  misc_feature 1..25: note = Oligonucleotide
  source 1..25: mol_type = other DNA
tgccggtgagtgggtggatgaaggt

SEQ ID NO: 38889 - DNA, 25 bp, synthetic construct
  misc_feature 1..25: note = Oligonucleotide
  source 1..25: mol_type = other DNA
gtttgccggtgagtgggtggatgaa

SEQ ID NO: 38890 - DNA, 25 bp, synthetic construct
  misc_feature 1..25: note = Oligonucleotide
  source 1..25: mol_type = other DNA
ggggtttgccggtgagtgggtggat

SEQ ID NO: 38891 - DNA, 25 bp, synthetic construct
  misc_feature 1..25: note = Oligonucleotide
  source 1..25: mol_type = other DNA
ccaggggtttgccggtgagtgggtg

SEQ ID NO: 38892 - DNA, 25 bp, synthetic construct
  misc_feature 1..25: note = Oligonucleotide
  source 1..25: mol_type = other DNA
ggtccaggggtttgccggtgagtgg

SEQ ID NO: 38893 - DNA, 25 bp, synthetic construct
  misc_feature 1..25: note = Oligonucleotide
  source 1..25: mol_type = other DNA
tggggtccaggggtttgccggtgag

SEQ ID NO: 38894 - DNA, 25 bp, synthetic construct
  misc_feature 1..25: note = Oligonucleotide
  source 1..25: mol_type = other DNA
agctggggtccaggggtttgccggt

SEQ ID NO: 38895 - DNA, 25 bp, synthetic construct
  misc_feature 1..25: note = Oligonucleotide
  source 1..25: mol_type = other DNA
gtgagctggggtccaggggtttgcc

SEQ ID NO: 38896 - DNA, 25 bp, synthetic construct
  misc_feature 1..25: note = Oligonucleotide
  source 1..25: mol_type = other DNA
ggggtgagctggggtccaggggttt

SEQ ID NO: 38897 - DNA, 25 bp, synthetic construct
  misc_feature 1..25: note = Oligonucleotide
  source 1..25: mol_type = other DNA
ccaggggtgagctggggtccagggg

SEQ ID NO: 38898 - DNA, 25 bp, synthetic construct
  misc_feature 1..25: note = Oligonucleotide
  source 1..25: mol_type = other DNA
gggccaggggtgagctggggtccag

SEQ ID NO: 38899 - DNA, 25 bp, synthetic construct
  misc_feature 1..25: note = Oligonucleotide
  source 1..25: mol_type = other DNA
caagggccaggggtgagctggggtc

SEQ ID NO: 38900 - DNA, 25 bp, synthetic construct
  misc_feature 1..25: note = Oligonucleotide
  source 1..25: mol_type = other DNA
gggcaagggccaggggtgagctggg

SEQ ID NO: 38901 - DNA, 25 bp, synthetic construct
  misc_feature 1..25: note = Oligonucleotide
  source 1..25: mol_type = other DNA
ccagggcaagggccaggggtgagct

SEQ ID NO: 38902 - DNA, 25 bp, synthetic construct
  misc_feature 1..25: note = Oligonucleotide
  source 1..25: mol_type = other DNA
cagccagggcaagggccaggggtga

SEQ ID NO: 38903 - DNA, 25 bp, synthetic construct
  misc_feature 1..25: note = Oligonucleotide
  source 1..25: mol_type = other DNA
gggcagccagggcaagggccagggg

SEQ ID NO: 38904 - DNA, 25 bp, synthetic construct
  misc_feature 1..25: note = Oligonucleotide
  source 1..25: mol_type = other DNA
ctcgggcagccagggcaagggccag

SEQ ID NO: 38905 - DNA, 25 bp, synthetic construct
  misc_feature 1..25: note = Oligonucleotide
  source 1..25: mol_type = other DNA
gctctcgggcagccagggcaagggc

SEQ ID NO: 38906 - DNA, 25 bp, synthetic construct
  misc_feature 1..25: note = Oligonucleotide
  source 1..25: mol_type = other DNA
ctcgctctcgggcagccagggcaag

SEQ ID NO: 38907 - DNA, 25 bp, synthetic construct
  misc_feature 1..25: note = Oligonucleotide
  source 1..25: mol_type = other DNA
gagctcgctctcgggcagccagggc

SEQ ID NO: 38908 - DNA, 25 bp, synthetic construct
  misc_feature 1..25: note = Oligonucleotide
  source 1..25: mol_type = other DNA
ccagagctcgctctcgggcagccag

SEQ ID NO: 38909 - DNA, 25 bp, synthetic construct
  misc_feature 1..25: note = Oligonucleotide
  source 1..25: mol_type = other DNA
aggccagagctcgctctcgggcagc

SEQ ID NO: 38910 - DNA, 25 bp, synthetic construct
  misc_feature 1..25: note = Oligonucleotide
  source 1..25: mol_type = other DNA
gggaggccagagctcgctctcgggc

SEQ ID NO: 38911 - DNA, 25 bp, synthetic construct
  misc_feature 1..25: note = Oligonucleotide
  source 1..25: mol_type = other DNA
cctgggaggccagagctcgctctcg

SEQ ID NO: 38912 - DNA, 25 bp, synthetic construct
  misc_feature 1..25: note = Oligonucleotide
  source 1..25: mol_type = other DNA
gcgcctgggaggccagagctcgctc

SEQ ID NO: 38913 - DNA, 25 bp, synthetic construct
  misc_feature 1..25: note = Oligonucleotide
  source 1..25: mol_type = other DNA
agggcgcctgggaggccagagctcg

SEQ ID NO: 38914 - DNA, 25 bp, synthetic construct
  misc_feature 1..25: note = Oligonucleotide
  source 1..25: mol_type = other DNA
gggagggcgcctgggaggccagagc

SEQ ID NO: 38915 - DNA, 25 bp, synthetic construct
  misc_feature 1..25: note = Oligonucleotide
  source 1..25: mol_type = other DNA
accgggagggcgcctgggaggccag

SEQ ID NO: 38916 - DNA, 25 bp, synthetic construct
  misc_feature 1..25: note = Oligonucleotide
  source 1..25: mol_type = other DNA
gggaccgggagggcgcctgggaggc

SEQ ID NO: 38917 - DNA, 25 bp, synthetic construct
  misc_feature 1..25: note = Oligonucleotide
  source 1..25: mol_type = other DNA
tgggggaccgggagggcgcctggga

SEQ ID NO: 38918 - DNA, 25 bp, synthetic construct
  misc_feature 1..25: note = Oligonucleotide
  source 1..25: mol_type = other DNA
gtgtgggggaccgggagggcgcctg

SEQ ID NO: 38919 - DNA, 25 bp, synthetic construct
  misc_feature 1..25: note = Oligonucleotide
  source 1..25: mol_type = other DNA
cgggtgtgggggaccgggagggcgc

SEQ ID NO: 38920 - DNA, 25 bp, synthetic construct
  misc_feature 1..25: note = Oligonucleotide
  source 1..25: mol_type = other DNA
gcacgggtgtgggggaccgggaggg

SEQ ID NO: 38921 - DNA, 25 bp, synthetic construct
  misc_feature 1..25: note = Oligonucleotide
  source 1..25: mol_type = other DNA
tgtgcacgggtgtgggggaccggga

SEQ ID NO: 38922 - DNA, 25 bp, synthetic construct
  misc_feature 1..25: note = Oligonucleotide
  source 1..25: mol_type = other DNA
gactgtgcacgggtgtgggggaccg

SEQ ID NO: 38923 - DNA, 25 bp, synthetic construct
  misc_feature 1..25: note = Oligonucleotide
  source 1..25: mol_type = other DNA
cgggactgtgcacgggtgtggggga

SEQ ID NO: 38924 - DNA, 25 bp, synthetic construct
  misc_feature 1..25: note = Oligonucleotide
  source 1..25: mol_type = other DNA
cgtcgggactgtgcacgggtgtggg

SEQ ID NO: 38925 - DNA, 25 bp, synthetic construct
  misc_feature 1..25: note = Oligonucleotide
  source 1..25: mol_type = other DNA
cggcgtcgggactgtgcacgggtgt

SEQ ID NO: 38926 - DNA, 25 bp, synthetic construct
  misc_feature 1..25: note = Oligonucleotide
  source 1..25: mol_type = other DNA
ggtcggcgtcgggactgtgcacggg

SEQ ID NO: 38927 - DNA, 25 bp, synthetic construct
  misc_feature 1..25: note = Oligonucleotide
  source 1..25: mol_type = other DNA
ggcggtcggcgtcgggactgtgcac

SEQ ID NO: 38928 - DNA, 25 bp, synthetic construct
  misc_feature 1..25: note = Oligonucleotide
  source 1..25: mol_type = other DNA
cggggcggtcggcgtcgggactgtg

SEQ ID NO: 38929 - DNA, 25 bp, synthetic construct
  misc_feature 1..25: note = Oligonucleotide
  source 1..25: mol_type = other DNA
gtccggggcggtcggcgtcgggact

SEQ ID NO: 38930 - DNA, 25 bp, synthetic construct
  misc_feature 1..25: note = Oligonucleotide
  source 1..25: mol_type = other DNA
ggggtccggggcggtcggcgtcggg

SEQ ID NO: 38931 - DNA, 25 bp, synthetic construct
  misc_feature 1..25: note = Oligonucleotide
  source 1..25: mol_type = other DNA
acaggggtccggggcggtcggcgtc

SEQ ID NO: 38932 - DNA, 25 bp, synthetic construct
  misc_feature 1..25: note = Oligonucleotide
  source 1..25: mol_type = other DNA
caaacaggggtccggggcggtcggc

SEQ ID NO: 38933 - DNA, 25 bp, synthetic construct
  misc_feature 1..25: note = Oligonucleotide
  source 1..25: mol_type = other DNA
ccacaaacaggggtccggggcggtc

SEQ ID NO: 38934 - DNA, 25 bp, synthetic construct
  misc_feature 1..25: note = Oligonucleotide
  source 1..25: mol_type = other DNA
catccacaaacaggggtccggggcg

SEQ ID NO: 38935 - DNA, 25 bp, synthetic construct
  misc_feature 1..25: note = Oligonucleotide
  source 1..25: mol_type = other DNA
gtacatccacaaacaggggtccggg

SEQ ID NO: 38936 - DNA, 25 bp, synthetic construct
  misc_feature 1..25: note = Oligonucleotide
  source 1..25: mol_type = other DNA
cctgtacatccacaaacaggggtcc

SEQ ID NO: 38937 - DNA, 25 bp, synthetic construct
  misc_feature 1..25: note = Oligonucleotide
  source 1..25: mol_type = other DNA
gggcctgtacatccacaaacagggg

SEQ ID NO: 38938 - DNA, 25 bp, synthetic construct
  misc_feature 1..25: note = Oligonucleotide
  source 1..25: mol_type = other DNA
cccgggcctgtacatccacaaacag

SEQ ID NO: 38939 - DNA, 25 bp, synthetic construct
  misc_feature 1..25: note = Oligonucleotide
  source 1..25: mol_type = other DNA
ggtcccgggcctgtacatccacaaa

SEQ ID NO: 38940 - DNA, 25 bp, synthetic construct
  misc_feature 1..25: note = Oligonucleotide
  source 1..25: mol_type = other DNA
ctgggtcccgggcctgtacatccac

SEQ ID NO: 38941 - DNA, 25 bp, synthetic construct
  misc_feature 1..25: note = Oligonucleotide
  source 1..25: mol_type = other DNA
gctctgggtcccgggcctgtacatc

SEQ ID NO: 38942 - DNA, 25 bp, synthetic construct
  misc_feature 1..25: note = Oligonucleotide
  source 1..25: mol_type = other DNA
ctcgctctgggtcccgggcctgtac

SEQ ID NO: 38943 - DNA, 25 bp, synthetic construct
  misc_feature 1..25: note = Oligonucleotide
  source 1..25: mol_type = other DNA
accctcgctctgggtcccgggcctg

SEQ ID NO: 38944 - DNA, 25 bp, synthetic construct
  misc_feature 1..25: note = Oligonucleotide
  source 1..25: mol_type = other DNA
gggaccctcgctctgggtcccgggc

SEQ ID NO: 38945 - DNA, 25 bp, synthetic construct
  misc_feature 1..25: note = Oligonucleotide
  source 1..25: mol_type = other DNA
ccagggaccctcgctctgggtcccg

SEQ ID NO: 38946 - DNA, 25 bp, synthetic construct
  misc_feature 1..25: note = Oligonucleotide
  source 1..25: mol_type = other DNA
aagccagggaccctcgctctgggtc

SEQ ID NO: 38947 - DNA, 25 bp, synthetic construct
  misc_feature 1..25: note = Oligonucleotide
  source 1..25: mol_type = other DNA
gggaagccagggaccctcgctctgg

SEQ ID NO: 38948 - DNA, 25 bp, synthetic construct
  misc_feature 1..25: note = Oligonucleotide
  source 1..25: mol_type = other DNA
ccggggaagccagggaccctcgctc

SEQ ID NO: 38949 - DNA, 25 bp, synthetic construct
  misc_feature 1..25: note = Oligonucleotide
  source 1..25: mol_type = other DNA
aagccggggaagccagggaccctcg

SEQ ID NO: 38950 - DNA, 25 bp, synthetic construct
  misc_feature 1..25: note = Oligonucleotide
  source 1..25: mol_type = other DNA
agaaagccggggaagccagggaccc

SEQ ID NO: 38951 - DNA, 25 bp, synthetic construct
  misc_feature 1..25: note = Oligonucleotide
  source 1..25: mol_type = other DNA
gggagaaagccggggaagccaggga

SEQ ID NO: 38952 - DNA, 25 bp, synthetic construct
  misc_feature 1..25: note = Oligonucleotide
  source 1..25: mol_type = other DNA
gtggggagaaagccggggaagccag

SEQ ID NO: 38953 - DNA, 25 bp, synthetic construct
  misc_feature 1..25: note = Oligonucleotide
  source 1..25: mol_type = other DNA
tccgtggggagaaagccggggaagc

SEQ ID NO: 38954 - DNA, 25 bp, synthetic construct
  misc_feature 1..25: note = Oligonucleotide
  source 1..25: mol_type = other DNA
ggctccgtggggagaaagccgggga

SEQ ID NO: 38955 - DNA, 25 bp, synthetic construct
  misc_feature 1..25: note = Oligonucleotide
  source 1..25: mol_type = other DNA
ctgggctccgtggggagaaagccgg

SEQ ID NO: 38956 - DNA, 25 bp, synthetic construct
  misc_feature 1..25: note = Oligonucleotide
  source 1..25: mol_type = other DNA
aggctgggctccgtggggagaaagc

SEQ ID NO: 38957 - DNA, 25 bp, synthetic construct
  misc_feature 1..25: note = Oligonucleotide
  source 1..25: mol_type = other DNA
tccaggctgggctccgtggggagaa

SEQ ID NO: 38958 - DNA, 25 bp, synthetic construct
  misc_feature 1..25: note = Oligonucleotide
  source 1..25: mol_type = other DNA
gaatccaggctgggctccgtgggga

SEQ ID NO: 38959 - DNA, 25 bp, synthetic construct
  misc_feature 1..25: note = Oligonucleotide
  source 1..25: mol_type = other DNA
caggaatccaggctgggctccgtgg

SEQ ID NO: 38960 - DNA, 25 bp, synthetic construct
  misc_feature 1..25: note = Oligonucleotide
  source 1..25: mol_type = other DNA
gcacaggaatccaggctgggctccg

SEQ ID NO: 38961 - DNA, 25 bp, synthetic construct
  misc_feature 1..25: note = Oligonucleotide
  source 1..25: mol_type = other DNA
caggcacaggaatccaggctgggct

SEQ ID NO: 38962 - DNA, 25 bp, synthetic construct
  misc_feature 1..25: note = Oligonucleotide
  source 1..25: mol_type = other DNA
gagcaggcacaggaatccaggctgg

SEQ ID NO: 38963 - DNA, 25 bp, synthetic construct
  misc_feature 1..25: note = Oligonucleotide
  source 1..25: mol_type = other DNA
tgcgagcaggcacaggaatccaggc

SEQ ID NO: 38964 - DNA, 25 bp, synthetic construct
  misc_feature 1..25: note = Oligonucleotide
  source 1..25: mol_type = other DNA
ccctgcgagcaggcacaggaatcca

SEQ ID NO: 38965 - DNA, 25 bp, synthetic construct
  misc_feature 1..25: note = Oligonucleotide
  source 1..25: mol_type = other DNA
cctccctgcgagcaggcacaggaat

SEQ ID NO: 38966 - DNA, 25 bp, synthetic construct
  misc_feature 1..25: note = Oligonucleotide
  source 1..25: mol_type = other DNA
ctgcctccctgcgagcaggcacagg

SEQ ID NO: 38967 - DNA, 25 bp, synthetic construct
  misc_feature 1..25: note = Oligonucleotide
  source 1..25: mol_type = other DNA
tctctgcctccctgcgagcaggcac

SEQ ID NO: 38968 - DNA, 25 bp, synthetic construct
  misc_feature 1..25: note = Oligonucleotide
  source 1..25: mol_type = other DNA
ccttctctgcctccctgcgagcagg

SEQ ID NO: 38969 - DNA, 25 bp, synthetic construct
  misc_feature 1..25: note = Oligonucleotide
  source 1..25: mol_type = other DNA
ggaccttctctgcctccctgcgagc

SEQ ID NO: 38970 - DNA, 25 bp, synthetic construct
  misc_feature 1..25: note = Oligonucleotide
  source 1..25: mol_type = other DNA
gggggaccttctctgcctccctgcg

SEQ ID NO: 38971 - DNA, 25 bp, synthetic construct
  misc_feature 1..25: note = Oligonucleotide
  source 1..25: mol_type = other DNA
cccgggggaccttctctgcctccct

SEQ ID NO: 38972 - DNA, 25 bp, synthetic construct
  misc_feature 1..25: note = Oligonucleotide
  source 1..25: mol_type = other DNA
cctcccgggggaccttctctgcctc

SEQ ID NO: 38973 - DNA, 25 bp, synthetic construct
  misc_feature 1..25: note = Oligonucleotide
  source 1..25: mol_type = other DNA
gctcctcccgggggaccttctctgc

SEQ ID NO: 38974 - DNA, 25 bp, synthetic construct
  misc_feature 1..25: note = Oligonucleotide
  source 1..25: mol_type = other DNA
tccgctcctcccgggggaccttctc

SEQ ID NO: 38975 - DNA, 25 bp, synthetic construct
  misc_feature 1..25: note = Oligonucleotide
  source 1..25: mol_type = other DNA
acttccgctcctcccgggggacctt

SEQ ID NO: 38976 - DNA, 25 bp, synthetic construct
  misc_feature 1..25: note = Oligonucleotide
  source 1..25: mol_type = other DNA
gtgacttccgctcctcccgggggac

SEQ ID NO: 38977 - DNA, 25 bp, synthetic construct
  misc_feature 1..25: note = Oligonucleotide
  source 1..25: mol_type = other DNA
cgggtgacttccgctcctcccgggg

SEQ ID NO: 38978 - DNA, 25 bp, synthetic construct
  misc_feature 1..25: note = Oligonucleotide
  source 1..25: mol_type = other DNA
cctcgggtgacttccgctcctcccg

SEQ ID NO: 38979 - DNA, 25 bp, synthetic construct
  misc_feature 1..25: note = Oligonucleotide
  source 1..25: mol_type = other DNA
tgtcctcgggtgacttccgctcctc

SEQ ID NO: 38980 - DNA, 25 bp, synthetic construct
  misc_feature 1..25: note = Oligonucleotide
  source 1..25: mol_type = other DNA
tcttgtcctcgggtgacttccgctc

SEQ ID NO: 38981 - DNA, 25 bp, synthetic construct
  misc_feature 1..25: note = Oligonucleotide
  source 1..25: mol_type = other DNA
acttcttgtcctcgggtgacttccg

SEQ ID NO: 38982 - DNA, 25 bp, synthetic construct
  misc_feature 1..25: note = Oligonucleotide
  source 1..25: mol_type = other DNA
tggacttcttgtcctcgggtgactt

SEQ ID NO: 38983 - DNA, 25 bp, synthetic construct
  misc_feature 1..25: note = Oligonucleotide
  source 1..25: mol_type = other DNA
tcatggacttcttgtcctcgggtga

SEQ ID NO: 38984 - DNA, 25 bp, synthetic construct
  misc_feature 1..25: note = Oligonucleotide
  source 1..25: mol_type = other DNA
ggatcatggacttcttgtcctcggg

SEQ ID NO: 38985 - DNA, 25 bp, synthetic construct
  misc_feature 1..25: note = Oligonucleotide
  source 1..25: mol_type = other DNA
tgaggatcatggacttcttgtcctc

SEQ ID NO: 38986 - DNA, 25 bp, synthetic construct
  misc_feature 1..25: note = Oligonucleotide
  source 1..25: mol_type = other DNA
cgctgaggatcatggacttcttgtc

SEQ ID NO: 38987 - DNA, 25 bp, synthetic construct
  misc_feature 1..25: note = Oligonucleotide
  source 1..25: mol_type = other DNA
ggacgctgaggatcatggacttctt

SEQ ID NO: 38988 - DNA, 25 bp, synthetic construct
  misc_feature 1..25: note = Oligonucleotide
  source 1..25: mol_type = other DNA
ccaggacgctgaggatcatggactt

SEQ ID NO: 38989 - DNA, 25 bp, synthetic construct
  misc_feature 1..25: note = Oligonucleotide
  source 1..25: mol_type = other DNA
tgtccaggacgctgaggatcatgga

SEQ ID NO: 38990 - DNA, 25 bp, synthetic construct
  misc_feature 1..25: note = Oligonucleotide
  source 1..25: mol_type = other DNA
atgtgtccaggacgctgaggatcat

SEQ ID NO: 38991 - DNA, 25 bp, synthetic construct
  misc_feature 1..25: note = Oligonucleotide
  source 1..25: mol_type = other DNA
gggatgtgtccaggacgctgaggat

SEQ ID NO: 38992 - DNA, 25 bp, synthetic construct
  misc_feature 1..25: note = Oligonucleotide
  source 1..25: mol_type = other DNA
gcagggatgtgtccaggacgctgag

SEQ ID NO: 38993 - DNA, 25 bp, synthetic construct
  misc_feature 1..25: note = Oligonucleotide
  source 1..25: mol_type = other DNA
gctgcagggatgtgtccaggacgct

SEQ ID NO: 38994 - DNA, 25 bp, synthetic construct
  misc_feature 1..25: note = Oligonucleotide
  source 1..25: mol_type = other DNA
gccgctgcagggatgtgtccaggac

SEQ ID NO: 38995 - DNA, 25 bp, synthetic construct
  misc_feature 1..25: note = Oligonucleotide
  source 1..25: mol_type = other DNA
ctggccgctgcagggatgtgtccag

SEQ ID NO: 38996 - DNA, 25 bp, synthetic construct
  misc_feature 1..25: note = Oligonucleotide
  source 1..25: mol_type = other DNA
cagctggccgctgcagggatgtgtc

SEQ ID NO: 38997 - DNA, 25 bp, synthetic construct
  misc_feature 1..25: note = Oligonucleotide
  source 1..25: mol_type = other DNA
ggccagctggccgctgcagggatgt

SEQ ID NO: 38998 - DNA, 25 bp, synthetic construct
  misc_feature 1..25: note = Oligonucleotide
  source 1..25: mol_type = other DNA
tgaggccagctggccgctgcaggga

SEQ ID NO: 38999 - DNA, 25 bp, synthetic construct
  misc_feature 1..25: note = Oligonucleotide
  source 1..25: mol_type = other DNA
cgatgaggccagctggccgctgcag

SEQ ID NO: 39000 - DNA, 25 bp, synthetic construct
  misc_feature 1..25: note = Oligonucleotide
  source 1..25: mol_type = other DNA
caacgatgaggccagctggccgctg

SEQ ID NO: 39001 - DNA, 25 bp, synthetic construct
  misc_feature 1..25: note = Oligonucleotide
  source 1..25: mol_type = other DNA
gcacaacgatgaggccagctggccg

SEQ ID NO: 39002 - DNA, 25 bp, synthetic construct
  misc_feature 1..25: note = Oligonucleotide
  source 1..25: mol_type = other DNA
cgtgcacaacgatgaggccagctgg

SEQ ID NO: 39003 - DNA, 25 bp, synthetic construct
  misc_feature 1..25: note = Oligonucleotide
  source 1..25: mol_type = other DNA
tggcgtgcacaacgatgaggccagc

SEQ ID NO: 39004 - DNA, 25 bp, synthetic construct
  misc_feature 1..25: note = Oligonucleotide
  source 1..25: mol_type = other DNA
tggtggcgtgcacaacgatgaggcc

SEQ ID NO: 39005 - DNA, 25 bp, synthetic construct
  misc_feature 1..25: note = Oligonucleotide
  source 1..25: mol_type = other DNA
tgctggtggcgtgcacaacgatgag

SEQ ID NO: 39006 - DNA, 25 bp, synthetic construct
  misc_feature 1..25: note = Oligonucleotide
  source 1..25: mol_type = other DNA
cgttgctggtggcgtgcacaacgat

SEQ ID NO: 39007 - DNA, 25 bp, synthetic construct
  misc_feature 1..25: note = Oligonucleotide
  source 1..25: mol_type = other DNA
gcccgttgctggtggcgtgcacaac

SEQ ID NO: 39008 - DNA, 25 bp, synthetic construct
  misc_feature 1..25: note = Oligonucleotide
  source 1..25: mol_type = other DNA
cctgcccgttgctggtggcgtgcac

SEQ ID NO: 39009 - DNA, 25 bp, synthetic construct
  misc_feature 1..25: note = Oligonucleotide
  source 1..25: mol_type = other DNA
gctcctgcccgttgctggtggcgtg

SEQ ID NO: 39010 - DNA, 25 bp, synthetic construct
  misc_feature 1..25: note = Oligonucleotide
  source 1..25: mol_type = other DNA
tgggctcctgcccgttgctggtggc

SEQ ID NO: 39011 - DNA, 25 bp, synthetic construct
  misc_feature 1..25: note = Oligonucleotide
  source 1..25: mol_type = other DNA
tgctgggctcctgcccgttgctggt

SEQ ID NO: 39012 - DNA, 25 bp, synthetic construct
  misc_feature 1..25: note = Oligonucleotide
  source 1..25: mol_type = other DNA
gcctgctgggctcctgcccgttgct

SEQ ID NO: 39013 - DNA, 25 bp, synthetic construct
  misc_feature 1..25: note = Oligonucleotide
  source 1..25: mol_type = other DNA
ccagcctgctgggctcctgcccgtt

SEQ ID NO: 39014 - DNA, 25 bp, synthetic construct
  misc_feature 1..25: note = Oligonucleotide
  source 1..25: mol_type = other DNA
cccccagcctgctgggctcctgccc

SEQ ID NO: 39015 - DNA, 25 bp, synthetic construct
  misc_feature 1..25: note = Oligonucleotide
  source 1..25: mol_type = other DNA
ccccccccagcctgctgggctcctg

SEQ ID NO: 39016 - DNA, 25 bp, synthetic construct
  misc_feature 1..25: note = Oligonucleotide
  source 1..25: mol_type = other DNA
cggccccccccagcctgctgggctc

SEQ ID NO: 39017 - DNA, 25 bp, synthetic construct
  misc_feature 1..25: note = Oligonucleotide
  source 1..25: mol_type = other DNA
cttcggccccccccagcctgctggg

SEQ ID NO: 39018 - DNA, 25 bp, synthetic construct
  misc_feature 1..25: note = Oligonucleotide
  source 1..25: mol_type = other DNA
cctcttcggccccccccagcctgct

SEQ ID NO: 39019 - DNA, 25 bp, synthetic construct
  misc_feature 1..25: note = Oligonucleotide
  source 1..25: mol_type = other DNA
gctcctcttcggccccccccagcct

SEQ ID NO: 39020 - DNA, 25 bp, synthetic construct
  misc_feature 1..25: note = Oligonucleotide
  source 1..25: mol_type = other DNA
ggcgctcctcttcggccccccccag

SEQ ID NO: 39021 - DNA, 25 bp, synthetic construct
  misc_feature 1..25: note = Oligonucleotide
  source 1..25: mol_type = other DNA
ccgggcgctcctcttcggccccccc

SEQ ID NO: 39022 - DNA, 25 bp, synthetic construct
  misc_feature 1..25: note = Oligonucleotide
  source 1..25: mol_type = other DNA
tgcccgggcgctcctcttcggcccc

SEQ ID NO: 39023 - DNA, 25 bp, synthetic construct
  misc_feature 1..25: note = Oligonucleotide
  source 1..25: mol_type = other DNA
gggtgcccgggcgctcctcttcggc

SEQ ID NO: 39024 - DNA, 25 bp, synthetic construct
  misc_feature 1..25: note = Oligonucleotide
  source 1..25: mol_type = other DNA
ccggggtgcccgggcgctcctcttc

SEQ ID NO: 39025 - DNA, 25 bp, synthetic construct
  misc_feature 1..25: note = Oligonucleotide
  source 1..25: mol_type = other DNA
actccggggtgcccgggcgctcctc

SEQ ID NO: 39026 - DNA, 25 bp, synthetic construct
  misc_feature 1..25: note = Oligonucleotide
  source 1..25: mol_type = other DNA
ccaactccggggtgcccgggcgctc

SEQ ID NO: 39027 - DNA, 25 bp, synthetic construct
  misc_feature 1..25: note = Oligonucleotide
  source 1..25: mol_type = other DNA
gggccaactccggggtgcccgggcg

SEQ ID NO: 39028 - DNA, 25 bp, synthetic construct
  misc_feature 1..25: note = Oligonucleotide
  source 1..25: mol_type = other DNA
ccggggccaactccggggtgcccgg

SEQ ID NO: 39029 - DNA, 25 bp, synthetic construct
  misc_feature 1..25: note = Oligonucleotide
  source 1..25: mol_type = other DNA
gggccggggccaactccggggtgcc

SEQ ID NO: 39030 - DNA, 25 bp, synthetic construct
  misc_feature 1..25: note = Oligonucleotide
  source 1..25: mol_type = other DNA
tgggggccggggccaactccggggt

SEQ ID NO: 39031 - DNA, 25 bp, synthetic construct
  misc_feature 1..25: note = Oligonucleotide
  source 1..25: mol_type = other DNA
gcatgggggccggggccaactccgg

SEQ ID NO: 39032 - DNA, 25 bp, synthetic construct
  misc_feature 1..25: note = Oligonucleotide
  source 1..25: mol_type = other DNA
actgcatgggggccggggccaactc

SEQ ID NO: 39033 - DNA, 25 bp, synthetic construct
  misc_feature 1..25: note = Oligonucleotide
  source 1..25: mol_type = other DNA
ctgactgcatgggggccggggccaa

SEQ ID NO: 39034 - DNA, 25 bp, synthetic construct
  misc_feature 1..25: note = Oligonucleotide
  source 1..25: mol_type = other DNA
ccgctgactgcatgggggccggggc

SEQ ID NO: 39035 - DNA, 25 bp, synthetic construct
  misc_feature 1..25: note = Oligonucleotide
  source 1..25: mol_type = other DNA
cagccgctgactgcatgggggccgg

SEQ ID NO: 39036 - DNA, 25 bp, synthetic construct
  misc_feature 1..25: note = Oligonucleotide
  source 1..25: mol_type = other DNA
ccacagccgctgactgcatgggggc

SEQ ID NO: 39037 - DNA, 25 bp, synthetic construct
  misc_feature 1..25: note = Oligonucleotide
  source 1..25: mol_type = other DNA
ctgccacagccgctgactgcatggg

SEQ ID NO: 39038 - DNA, 25 bp, synthetic construct
  misc_feature 1..25: note = Oligonucleotide
  source 1..25: mol_type = other DNA
gctctgccacagccgctgactgcat

SEQ ID NO: 39039 - DNA, 25 bp, synthetic construct
  misc_feature 1..25: note = Oligonucleotide
  source 1..25: mol_type = other DNA
ggggctctgccacagccgctgactg

SEQ ID NO: 39040 - DNA, 25 bp, synthetic construct
  misc_feature 1..25: note = Oligonucleotide
  source 1..25: mol_type = other DNA
gcaggggctctgccacagccgctga

SEQ ID NO: 39041 - DNA, 25 bp, synthetic construct
  misc_feature 1..25: note = Oligonucleotide
  source 1..25: mol_type = other DNA
tgggcaggggctctgccacagccgc

SEQ ID NO: 39042 - DNA, 25 bp, synthetic construct
  misc_feature 1..25: note = Oligonucleotide
  source 1..25: mol_type = other DNA
ggctgggcaggggctctgccacagc

SEQ ID NO: 39043 - DNA, 25 bp, synthetic construct
  misc_feature 1..25: note = Oligonucleotide
  source 1..25: mol_type = other DNA
gggggctgggcaggggctctgccac

SEQ ID NO: 39044 - DNA, 25 bp, synthetic construct
  misc_feature 1..25: note = Oligonucleotide
  source 1..25: mol_type = other DNA
cccgggggctgggcaggggctctgc

SEQ ID NO: 39045 - DNA, 25 bp, synthetic construct
  misc_feature 1..25: note = Oligonucleotide
  source 1..25: mol_type = other DNA
gggcccgggggctgggcaggggctc

SEQ ID NO: 39046 - DNA, 25 bp, synthetic construct
  misc_feature 1..25: note = Oligonucleotide
  source 1..25: mol_type = other DNA
gctgggcccgggggctgggcagggg

SEQ ID NO: 39047 - DNA, 25 bp, synthetic construct
  misc_feature 1..25: note = Oligonucleotide
  source 1..25: mol_type = other DNA
ggggctgggcccgggggctgggcag

SEQ ID NO: 39048 - DNA, 25 bp, synthetic construct
  misc_feature 1..25: note = Oligonucleotide
  source 1..25: mol_type = other DNA
cagggggctgggcccgggggctggg

SEQ ID NO: 39049 - DNA, 25 bp, synthetic construct
  misc_feature 1..25: note = Oligonucleotide
  source 1..25: mol_type = other DNA
caccagggggctgggcccgggggct

SEQ ID NO: 39050 - DNA, 25 bp, synthetic construct
  misc_feature 1..25: note = Oligonucleotide
  source 1..25: mol_type = other DNA
tgccaccagggggctgggcccgggg

SEQ ID NO: 39051 - DNA, 25 bp, synthetic construct
  misc_feature 1..25: note = Oligonucleotide
  source 1..25: mol_type = other DNA
gggtgccaccagggggctgggcccg

SEQ ID NO: 39052 - DNA, 25 bp, synthetic construct
  misc_feature 1..25: note = Oligonucleotide
  source 1..25: mol_type = other DNA
ccggggtgccaccagggggctgggc

SEQ ID NO: 39053 - DNA, 25 bp, synthetic construct
  misc_feature 1..25: note = Oligonucleotide
  source 1..25: mol_type = other DNA
ctgccggggtgccaccagggggctg

SEQ ID NO: 39054 - DNA, 25 bp, synthetic construct
  misc_feature 1..25: note = Oligonucleotide
  source 1..25: mol_type = other DNA
cgtctgccggggtgccaccaggggg

SEQ ID NO: 39055 - DNA, 25 bp, synthetic construct
  misc_feature 1..25: note = Oligonucleotide
  source 1..25: mol_type = other DNA
cggcgtctgccggggtgccaccagg

SEQ ID NO: 39056 - DNA, 25 bp, synthetic construct
  misc_feature 1..25: note = Oligonucleotide
  source 1..25: mol_type = other DNA
gcccggcgtctgccggggtgccacc

SEQ ID NO: 39057 - DNA, 25 bp, synthetic construct
  misc_feature 1..25: note = Oligonucleotide
  source 1..25: mol_type = other DNA
ctggcccggcgtctgccggggtgcc

SEQ ID NO: 39058 - DNA, 25 bp, synthetic construct
  misc_feature 1..25: note = Oligonucleotide
  source 1..25: mol_type = other DNA
ggcctggcccggcgtctgccggggt

SEQ ID NO: 39059 - DNA, 25 bp, synthetic construct
  misc_feature 1..25: note = Oligonucleotide
  source 1..25: mol_type = other DNA
cctggcctggcccggcgtctgccgg

SEQ ID NO: 39060 - DNA, 25 bp, synthetic construct
  misc_feature 1..25: note = Oligonucleotide
  source 1..25: mol_type = other DNA
tgccctggcctggcccggcgtctgc

SEQ ID NO: 39061 - DNA, 25 bp, synthetic construct
  misc_feature 1..25: note = Oligonucleotide
  source 1..25: mol_type = other DNA
agctgccctggcctggcccggcgtc

SEQ ID NO: 39062 - DNA, 25 bp, synthetic construct
  misc_feature 1..25: note = Oligonucleotide
  source 1..25: mol_type = other DNA
ctgagctgccctggcctggcccggc

SEQ ID NO: 39063 - DNA, 25 bp, synthetic construct
  misc_feature 1..25: note = Oligonucleotide
  source 1..25: mol_type = other DNA
cctctgagctgccctggcctggccc

SEQ ID NO: 39064 - DNA, 25 bp, synthetic construct
  misc_feature 1..25: note = Oligonucleotide
  source 1..25: mol_type = other DNA
cttcctctgagctgccctggcctgg

SEQ ID NO: 39065 - DNA, 25 bp, synthetic construct
  misc_feature 1..25: note = Oligonucleotide
  source 1..25: mol_type = other DNA
gctcttcctctgagctgccctggcc

SEQ ID NO: 39066 - DNA, 25 bp, synthetic construct
  misc_feature 1..25: note = Oligonucleotide
  source 1..25: mol_type = other DNA
ctggctcttcctctgagctgccctg

SEQ ID NO: 39067 - DNA, 25 bp, synthetic construct
  misc_feature 1..25: note = Oligonucleotide
  source 1..25: mol_type = other DNA
gctctggctcttcctctgagctgcc

SEQ ID NO: 39068 - DNA, 25 bp, synthetic construct
  misc_feature 1..25: note = Oligonucleotide
  source 1..25: mol_type = other DNA
ccagctctggctcttcctctgagct

SEQ ID NO: 39069 - DNA, 25 bp, synthetic construct
  misc_feature 1..25: note = Oligonucleotide
  source 1..25: mol_type = other DNA
acaccagctctggctcttcctctga

SEQ ID NO: 39070 - DNA, 25 bp, synthetic construct
  misc_feature 1..25: note = Oligonucleotide
  source 1..25: mol_type = other DNA
caaacaccagctctggctcttcctc

SEQ ID NO: 39071 - DNA, 25 bp, synthetic construct
  misc_feature 1..25: note = Oligonucleotide
  source 1..25: mol_type = other DNA
cagcaaacaccagctctggctcttc

SEQ ID NO: 39072 - DNA, 25 bp, synthetic construct
  misc_feature 1..25: note = Oligonucleotide
  source 1..25: mol_type = other DNA
tcacagcaaacaccagctctggctc

SEQ ID NO: 39073 - DNA, 25 bp, synthetic construct
  misc_feature 1..25: note = Oligonucleotide
  source 1..25: mol_type = other DNA
ggttcacagcaaacaccagctctgg

SEQ ID NO: 39074 - DNA, 25 bp, synthetic construct
  misc_feature 1..25: note = Oligonucleotide
  source 1..25: mol_type = other DNA
gcaggttcacagcaaacaccagctc

SEQ ID NO: 39075 - DNA, 25 bp, synthetic construct
  misc_feature 1..25: note = Oligonucleotide
  source 1..25: mol_type = other DNA
gtggcaggttcacagcaaacaccag

SEQ ID NO: 39076 - DNA, 25 bp, synthetic construct
  misc_feature 1..25: note = Oligonucleotide
  source 1..25: mol_type = other DNA
caggtggcaggttcacagcaaacac

SEQ ID NO: 39077 - DNA, 25 bp, synthetic construct
  misc_feature 1..25: note = Oligonucleotide
  source 1..25: mol_type = other DNA
gggcaggtggcaggttcacagcaaa

SEQ ID NO: 39078 - DNA, 25 bp, synthetic construct
  misc_feature 1..25: note = Oligonucleotide
  source 1..25: mol_type = other DNA
gctgggcaggtggcaggttcacagc

SEQ ID NO: 39079 - DNA, 25 bp, synthetic construct
  misc_feature 1..25: note = Oligonucleotide
  source 1..25: mol_type = other DNA
acagctgggcaggtggcaggttcac

SEQ ID NO: 39080 - DNA, 25 bp, synthetic construct
  misc_feature 1..25: note = Oligonucleotide
  source 1..25: mol_type = other DNA
acgacagctgggcaggtggcaggtt

SEQ ID NO: 39081 - DNA, 25 bp, synthetic construct
  misc_feature 1..25: note = Oligonucleotide
  source 1..25: mol_type = other DNA
tggacgacagctgggcaggtggcag

SEQ ID NO: 39082 - DNA, 25 bp, synthetic construct
  misc_feature 1..25: note = Oligonucleotide
  source 1..25: mol_type = other DNA
cgctggacgacagctgggcaggtgg

SEQ ID NO: 39083 - DNA, 25 bp, synthetic construct
  misc_feature 1..25: note = Oligonucleotide
  source 1..25: mol_type = other DNA
catcgctggacgacagctgggcagg

SEQ ID NO: 39084 - DNA, 25 bp, synthetic construct
  misc_feature 1..25: note = Oligonucleotide
  source 1..25: mol_type = other DNA
cctcatcgctggacgacagctgggc

SEQ ID NO: 39085 - DNA, 25 bp, synthetic construct
  misc_feature 1..25: note = Oligonucleotide
  source 1..25: mol_type = other DNA
tctcctcatcgctggacgacagctg

SEQ ID NO: 39086 - DNA, 25 bp, synthetic construct
  misc_feature 1..25: note = Oligonucleotide
  source 1..25: mol_type = other DNA
tggtctcctcatcgctggacgacag

SEQ ID NO: 39087 - DNA, 25 bp, synthetic construct
  misc_feature 1..25: note = Oligonucleotide
  source 1..25: mol_type = other DNA
ccctggtctcctcatcgctggacga

SEQ ID NO: 39088 - DNA, 25 bp, synthetic construct
  misc_feature 1..25: note = Oligonucleotide
  source 1..25: mol_type = other DNA
cctccctggtctcctcatcgctgga

SEQ ID NO: 39089 - DNA, 25 bp, synthetic construct
  misc_feature 1..25: note = Oligonucleotide
  source 1..25: mol_type = other DNA
gctcctccctggtctcctcatcgct

SEQ ID NO: 39090 - DNA, 25 bp, synthetic construct
  misc_feature 1..25: note = Oligonucleotide
  source 1..25: mol_type = other DNA
ccagctcctccctggtctcctcatc

SEQ ID NO: 39091 - DNA, 25 bp, synthetic construct
  misc_feature 1..25: note = Oligonucleotide
  source 1..25: mol_type = other DNA
gggccagctcctccctggtctcctc

SEQ ID NO: 39092 - DNA, 25 bp, synthetic construct
  misc_feature 1..25: note = Oligonucleotide
  source 1..25: mol_type = other DNA
ttcgggccagctcctccctggtctc

SEQ ID NO: 39093 - DNA, 25 bp, synthetic construct
  misc_feature 1..25: note = Oligonucleotide
  source 1..25: mol_type = other DNA
caattcgggccagctcctccctggt

SEQ ID NO: 39094 - DNA, 25 bp, synthetic construct
  misc_feature 1..25: note = Oligonucleotide
  source 1..25: mol_type = other DNA
acccaattcgggccagctcctccct

SEQ ID NO: 39095 - DNA, 25 bp, synthetic construct
  misc_feature 1..25: note = Oligonucleotide
  source 1..25: mol_type = other DNA
ccaacccaattcgggccagctcctc

SEQ ID NO: 39096 - DNA, 25 bp, synthetic construct
  misc_feature 1..25: note = Oligonucleotide
  source 1..25: mol_type = other DNA
gcaccaacccaattcgggccagctc

SEQ ID NO: 39097 - DNA, 25 bp, synthetic construct
  misc_feature 1..25: note = Oligonucleotide
  source 1..25: mol_type = other DNA
gtggcaccaacccaattcgggccag

SEQ ID NO: 39098 - DNA, 25 bp, synthetic construct
  misc_feature 1..25: note = Oligonucleotide
  source 1..25: mol_type = other DNA
ggggtggcaccaacccaattcgggc

SEQ ID NO: 39099 - DNA, 25 bp, synthetic construct
  misc_feature 1..25: note = Oligonucleotide
  source 1..25: mol_type = other DNA
cagggggtggcaccaacccaattcg

SEQ ID NO: 39100 - DNA, 25 bp, synthetic construct
  misc_feature 1..25: note = Oligonucleotide
  source 1..25: mol_type = other DNA
cttcagggggtggcaccaacccaat

SEQ ID NO: 39101 - DNA, 25 bp, synthetic construct
  misc_feature 1..25: note = Oligonucleotide
  source 1..25: mol_type = other DNA
actcttcagggggtggcaccaaccc

SEQ ID NO: 39102 - DNA, 25 bp, synthetic construct
  misc_feature 1..25: note = Oligonucleotide
  source 1..25: mol_type = other DNA
caaactcttcagggggtggcaccaa

SEQ ID NO: 39103 - DNA, 25 bp, synthetic construct
  misc_feature 1..25: note = Oligonucleotide
  source 1..25: mol_type = other DNA
tggcaaactcttcagggggtggcac

SEQ ID NO: 39104 - DNA, 25 bp, synthetic construct
  misc_feature 1..25: note = Oligonucleotide
  source 1..25: mol_type = other DNA
cgttggcaaactcttcagggggtgg

SEQ ID NO: 39105 - DNA, 25 bp, synthetic construct
  misc_feature 1..25: note = Oligonucleotide
  source 1..25: mol_type = other DNA
ccccgttggcaaactcttcaggggg

SEQ ID NO: 39106 - DNA, 25 bp, synthetic construct
  misc_feature 1..25: note = Oligonucleotide
  source 1..25: mol_type = other DNA
ggaccccgttggcaaactcttcagg

SEQ ID NO: 39107 - DNA, 25 bp, synthetic construct
  misc_feature 1..25: note = Oligonucleotide
  source 1..25: mol_type = other DNA
gcaggaccccgttggcaaactcttc

SEQ ID NO: 39108 - DNA, 25 bp, synthetic construct
  misc_feature 1..25: note = Oligonucleotide
  source 1..25: mol_type = other DNA
ccagcaggaccccgttggcaaactc

SEQ ID NO: 39109 - DNA, 25 bp, synthetic construct
  misc_feature 1..25: note = Oligonucleotide
  source 1..25: mol_type = other DNA
tggccagcaggaccccgttggcaaa

SEQ ID NO: 39110 - DNA, 25 bp, synthetic construct
  misc_feature 1..25: note = Oligonucleotide
  source 1..25: mol_type = other DNA
gggtggccagcaggaccccgttggc

SEQ ID NO: 39111 - DNA, 25 bp, synthetic construct
  misc_feature 1..25: note = Oligonucleotide
  source 1..25: mol_type = other DNA
gtggggtggccagcaggaccccgtt

SEQ ID NO: 39112 - DNA, 25 bp, synthetic construct
  misc_feature 1..25: note = Oligonucleotide
  source 1..25: mol_type = other DNA
cgagtggggtggccagcaggacccc

SEQ ID NO: 39113 - DNA, 25 bp, synthetic construct
  misc_feature 1..25: note = Oligonucleotide
  source 1..25: mol_type = other DNA
cagcgagtggggtggccagcaggac

SEQ ID NO: 39114 - DNA, 25 bp, synthetic construct
  misc_feature 1..25: note = Oligonucleotide
  source 1..25: mol_type = other DNA
ggccagcgagtggggtggccagcag

SEQ ID NO: 39115 - DNA, 25 bp, synthetic construct
  misc_feature 1..25: note = Oligonucleotide
  source 1..25: mol_type = other DNA
ccgggccagcgagtggggtggccag

SEQ ID NO: 39116 - DNA, 25 bp, synthetic construct
  misc_feature 1..25: note = Oligonucleotide
  source 1..25: mol_type = other DNA
ggcccgggccagcgagtggggtggc

SEQ ID NO: 39117 - DNA, 25 bp, synthetic construct
  misc_feature 1..25: note = Oligonucleotide
  source 1..25: mol_type = other DNA
aggggcccgggccagcgagtggggt

SEQ ID NO: 39118 - DNA, 25 bp, synthetic construct
  misc_feature 1..25: note = Oligonucleotide
  source 1..25: mol_type = other DNA
gcgaggggcccgggccagcgagtgg

SEQ ID NO: 39119 - DNA, 25 bp, synthetic construct
  misc_feature 1..25: note = Oligonucleotide
  source 1..25: mol_type = other DNA
tgggcgaggggcccgggccagcgag

SEQ ID NO: 39120 - DNA, 25 bp, synthetic construct
  misc_feature 1..25: note = Oligonucleotide
  source 1..25: mol_type = other DNA
tggtgggcgaggggcccgggccagc

SEQ ID NO: 39121 - DNA, 25 bp, synthetic construct
  misc_feature 1..25: note = Oligonucleotide
  source 1..25: mol_type = other DNA
ccgtggtgggcgaggggcccgggcc

SEQ ID NO: 39122 - DNA, 25 bp, synthetic construct
  misc_feature 1..25: note = Oligonucleotide
  source 1..25: mol_type = other DNA
gcaccgtggtgggcgaggggcccgg

SEQ ID NO: 39123 - DNA, 25 bp, synthetic construct
  misc_feature 1..25: note = Oligonucleotide
  source 1..25: mol_type = other DNA
tgggcaccgtggtgggcgaggggcc

SEQ ID NO: 39124 - DNA, 25 bp, synthetic construct
  misc_feature 1..25: note = Oligonucleotide
  source 1..25: mol_type = other DNA
ggctgggcaccgtggtgggcgaggg

SEQ ID NO: 39125 - DNA, 25 bp, synthetic construct
  misc_feature 1..25: note = Oligonucleotide
  source 1..25: mol_type = other DNA
ccgggctgggcaccgtggtgggcga

SEQ ID NO: 39126 - DNA, 25 bp, synthetic construct
  misc_feature 1..25: note = Oligonucleotide
  source 1..25: mol_type = other DNA
aggccgggctgggcaccgtggtggg

SEQ ID NO: 39127 - DNA, 25 bp, synthetic construct
  misc_feature 1..25: note = Oligonucleotide
  source 1..25: mol_type = other DNA
ctgaggccgggctgggcaccgtggt

SEQ ID NO: 39128 - DNA, 25 bp, synthetic construct
  misc_feature 1..25: note = Oligonucleotide
  source 1..25: mol_type = other DNA
tccctgaggccgggctgggcaccgt

SEQ ID NO: 39129 - DNA, 25 bp, synthetic construct
  misc_feature 1..25: note = Oligonucleotide
  source 1..25: mol_type = other DNA
gcttccctgaggccgggctgggcac

SEQ ID NO: 39130 - DNA, 25 bp, synthetic construct
  misc_feature 1..25: note = Oligonucleotide
  source 1..25: mol_type = other DNA
tgggcttccctgaggccgggctggg

SEQ ID NO: 39131 - DNA, 25 bp, synthetic construct
  misc_feature 1..25: note = Oligonucleotide
  source 1..25: mol_type = other DNA
tgctgggcttccctgaggccgggct

SEQ ID NO: 39132 - DNA, 25 bp, synthetic construct
  misc_feature 1..25: note = Oligonucleotide
  source 1..25: mol_type = other DNA
cactgctgggcttccctgaggccgg

SEQ ID NO: 39133 - DNA, 25 bp, synthetic construct
  misc_feature 1..25: note = Oligonucleotide
  source 1..25: mol_type = other DNA
gctcactgctgggcttccctgaggc

SEQ ID NO: 39134 - DNA, 25 bp, synthetic construct
  misc_feature 1..25: note = Oligonucleotide
  source 1..25: mol_type = other DNA
gtggctcactgctgggcttccctga

SEQ ID NO: 39135 - DNA, 25 bp, synthetic construct
  misc_feature 1..25: note = Oligonucleotide
  source 1..25: mol_type = other DNA
ggggtggctcactgctgggcttccc

SEQ ID NO: 39136 - DNA, 25 bp, synthetic construct
  misc_feature 1..25: note = Oligonucleotide
  source 1..25: mol_type = other DNA
cagggggtggctcactgctgggctt

SEQ ID NO: 39137 - DNA, 25 bp, synthetic construct
  misc_feature 1..25: note = Oligonucleotide
  source 1..25: mol_type = other DNA
gggcagggggtggctcactgctggg

SEQ ID NO: 39138 - DNA, 25 bp, synthetic construct
  misc_feature 1..25: note = Oligonucleotide
  source 1..25: mol_type = other DNA
caggggcagggggtggctcactgct

SEQ ID NO: 39139 - DNA, 25 bp, synthetic construct
  misc_feature 1..25: note = Oligonucleotide
  source 1..25: mol_type = other DNA
actcaggggcagggggtggctcact

SEQ ID NO: 39140 - DNA, 25 bp, synthetic construct
  misc_feature 1..25: note = Oligonucleotide
  source 1..25: mol_type = other DNA
cagactcaggggcagggggtggctc

SEQ ID NO: 39141 - DNA, 25 bp, synthetic construct
  misc_feature 1..25: note = Oligonucleotide
  source 1..25: mol_type = other DNA
ctgcagactcaggggcagggggtgg

SEQ ID NO: 39142 - DNA, 25 bp, synthetic construct
  misc_feature 1..25: note = Oligonucleotide
  source 1..25: mol_type = other DNA
cggctgcagactcaggggcaggggg

SEQ ID NO: 39143 - DNA, 25 bp, synthetic construct
  misc_feature 1..25: note = Oligonucleotide
  source 1..25: mol_type = other DNA
agtcggctgcagactcaggggcagg

SEQ ID NO: 39144 - DNA, 25 bp, synthetic construct
  misc_feature 1..25: note = Oligonucleotide
  source 1..25: mol_type = other DNA
cagagtcggctgcagactcaggggc

SEQ ID NO: 39145 - DNA, 25 bp, synthetic construct
  misc_feature 1..25: note = Oligonucleotide
  source 1..25: mol_type = other DNA
ccccagagtcggctgcagactcagg

SEQ ID NO: 39146 - DNA, 25 bp, synthetic construct
  misc_feature 1..25: note = Oligonucleotide
  source 1..25: mol_type = other DNA
ccaccccagagtcggctgcagactc

SEQ ID NO: 39147 - DNA, 25 bp, synthetic construct
  misc_feature 1..25: note = Oligonucleotide
  source 1..25: mol_type = other DNA
cctccaccccagagtcggctgcaga

SEQ ID NO: 39148 - DNA, 25 bp, synthetic construct
  misc_feature 1..25: note = Oligonucleotide
  source 1..25: mol_type = other DNA
cctcctccaccccagagtcggctgc

SEQ ID NO: 39149 - DNA, 25 bp, synthetic construct
  misc_feature 1..25: note = Oligonucleotide
  source 1..25: mol_type = other DNA
cagcctcctccaccccagagtcggc

SEQ ID NO: 39150 - DNA, 25 bp, synthetic construct
  misc_feature 1..25: note = Oligonucleotide
  source 1..25: mol_type = other DNA
tgtcagcctcctccaccccagagtc

SEQ ID NO: 39151 - DNA, 25 bp, synthetic construct
  misc_feature 1..25: note = Oligonucleotide
  source 1..25: mol_type = other DNA
gtgtgtcagcctcctccaccccaga

SEQ ID NO: 39152 - DNA, 25 bp, synthetic construct
  misc_feature 1..25: note = Oligonucleotide
  source 1..25: mol_type = other DNA
tgcgtgtgtcagcctcctccacccc

SEQ ID NO: 39153 - DNA, 25 bp, synthetic construct
  misc_feature 1..25: note = Oligonucleotide
  source 1..25: mol_type = other DNA
agctgcgtgtgtcagcctcctccac

SEQ ID NO: 39154 - DNA, 25 bp, synthetic construct
  misc_feature 1..25: note = Oligonucleotide
  source 1..25: mol_type = other DNA
tggagctgcgtgtgtcagcctcctc

SEQ ID NO: 39155 - DNA, 25 bp, synthetic construct
  misc_feature 1..25: note = Oligonucleotide
  source 1..25: mol_type = other DNA
cgctggagctgcgtgtgtcagcctc

SEQ ID NO: 39156 - DNA, 25 bp, synthetic construct
  misc_feature 1..25: note = Oligonucleotide
  source 1..25: mol_type = other DNA
ggtcgctggagctgcgtgtgtcagc

SEQ ID NO: 39157 - DNA, 25 bp, synthetic construct
  misc_feature 1..25: note = Oligonucleotide
  source 1..25: mol_type = other DNA
gggggtcgctggagctgcgtgtgtc

SEQ ID NO: 39158 - DNA, 25 bp, synthetic construct
  misc_feature 1..25: note = Oligonucleotide
  source 1..25: mol_type = other DNA
ggtgggggtcgctggagctgcgtgt

SEQ ID NO: 39159 - DNA, 25 bp, synthetic construct
  misc_feature 1..25: note = Oligonucleotide
  source 1..25: mol_type = other DNA
ccaggtgggggtcgctggagctgcg

SEQ ID NO: 39160 - DNA, 25 bp, synthetic construct
  misc_feature 1..25: note = Oligonucleotide
  source 1..25: mol_type = other DNA
tctccaggtgggggtcgctggagct

SEQ ID NO: 39161 - DNA, 25 bp, synthetic construct
  misc_feature 1..25: note = Oligonucleotide
  source 1..25: mol_type = other DNA
tggtctccaggtgggggtcgctgga

SEQ ID NO: 39162 - DNA, 25 bp, synthetic construct
  misc_feature 1..25: note = Oligonucleotide
  source 1..25: mol_type = other DNA
ttgtggtctccaggtgggggtcgct

SEQ ID NO: 39163 - DNA, 25 bp, synthetic construct
  misc_feature 1..25: note = Oligonucleotide
  source 1..25: mol_type = other DNA
tgcttgtggtctccaggtgggggtc

SEQ ID NO: 39164 - DNA, 25 bp, synthetic construct
  misc_feature 1..25: note = Oligonucleotide
  source 1..25: mol_type = other DNA
tggtgcttgtggtctccaggtgggg

SEQ ID NO: 39165 - DNA, 25 bp, synthetic construct
  misc_feature 1..25: note = Oligonucleotide
  source 1..25: mol_type = other DNA
agatggtgcttgtggtctccaggtg

SEQ ID NO: 39166 - DNA, 25 bp, synthetic construct
  misc_feature 1..25: note = Oligonucleotide
  source 1..25: mol_type = other DNA
tggagatggtgcttgtggtctccag

SEQ ID NO: 39167 - DNA, 25 bp, synthetic construct
  misc_feature 1..25: note = Oligonucleotide
  source 1..25: mol_type = other DNA
ccgtggagatggtgcttgtggtctc

SEQ ID NO: 39168 - DNA, 25 bp, synthetic construct
  misc_feature 1..25: note = Oligonucleotide
  source 1..25: mol_type = other DNA
acaccgtggagatggtgcttgtggt

SEQ ID NO: 39169 - DNA, 25 bp, synthetic construct
  misc_feature 1..25: note = Oligonucleotide
  source 1..25: mol_type = other DNA
tggacaccgtggagatggtgcttgt

SEQ ID NO: 39170 - DNA, 25 bp, synthetic construct
  misc_feature 1..25: note = Oligonucleotide
  source 1..25: mol_type = other DNA
tgctggacaccgtggagatggtgct

SEQ ID NO: 39171 - DNA, 25 bp, synthetic construct
  misc_feature 1..25: note = Oligonucleotide
  source 1..25: mol_type = other DNA
acatgctggacaccgtggagatggt

SEQ ID NO: 39172 - DNA, 25 bp, synthetic construct
  misc_feature 1..25: note = Oligonucleotide
  source 1..25: mol_type = other DNA
tggacatgctggacaccgtggagat

SEQ ID NO: 39173 - DNA, 25 bp, synthetic construct
  misc_feature 1..25: note = Oligonucleotide
  source 1..25: mol_type = other DNA
aggtggacatgctggacaccgtgga

SEQ ID NO: 39174 - DNA, 25 bp, synthetic construct
  misc_feature 1..25: note = Oligonucleotide
  source 1..25: mol_type = other DNA
tcaaggtggacatgctggacaccgt

SEQ ID NO: 39175 - DNA, 25 bp, synthetic construct
  misc_feature 1..25: note = Oligonucleotide
  source 1..25: mol_type = other DNA
agctcaaggtggacatgctggacac

SEQ ID NO: 39176 - DNA, 25 bp, synthetic construct
  misc_feature 1..25: note = Oligonucleotide
  source 1..25: mol_type = other DNA
ccgagctcaaggtggacatgctgga

SEQ ID NO: 39177 - DNA, 25 bp, synthetic construct
  misc_feature 1..25: note = Oligonucleotide
  source 1..25: mol_type = other DNA
tctccgagctcaaggtggacatgct

SEQ ID NO: 39178 - DNA, 25 bp, synthetic construct
  misc_feature 1..25: note = Oligonucleotide
  source 1..25: mol_type = other DNA
cgctctccgagctcaaggtggacat

SEQ ID NO: 39179 - DNA, 25 bp, synthetic construct
  misc_feature 1..25: note = Oligonucleotide
  source 1..25: mol_type = other DNA
ccccgctctccgagctcaaggtgga

SEQ ID NO: 39180 - DNA, 25 bp, synthetic construct
  misc_feature 1..25: note = Oligonucleotide
  source 1..25: mol_type = other DNA
gttccccgctctccgagctcaaggt

SEQ ID NO: 39181 - DNA, 25 bp, synthetic construct
  misc_feature 1..25: note = Oligonucleotide
  source 1..25: mol_type = other DNA
tgagttccccgctctccgagctcaa

SEQ ID NO: 39182 - DNA, 25 bp, synthetic construct
  misc_feature 1..25: note = Oligonucleotide
  source 1..25: mol_type = other DNA
cagtgagttccccgctctccgagct

SEQ ID NO: 39183 - DNA, 25 bp, synthetic construct
  misc_feature 1..25: note = Oligonucleotide
  source 1..25: mol_type = other DNA
tgtcagtgagttccccgctctccga

SEQ ID NO: 39184 - DNA, 25 bp, synthetic construct
  misc_feature 1..25: note = Oligonucleotide
  source 1..25: mol_type = other DNA
gggtgtcagtgagttccccgctctc

SEQ ID NO: 39185 - DNA, 25 bp, synthetic construct
  misc_feature 1..25: note = Oligonucleotide
  source 1..25: mol_type = other DNA
tgtgggtgtcagtgagttccccgct

SEQ ID NO: 39186 - DNA, 25 bp, synthetic construct
  misc_feature 1..25: note = Oligonucleotide
  source 1..25: mol_type = other DNA
aggtgtgggtgtcagtgagttcccc

SEQ ID NO: 39187 - DNA, 25 bp, synthetic construct
  misc_feature 1..25: note = Oligonucleotide
  source 1..25: mol_type = other DNA
aggaggtgtgggtgtcagtgagttc

SEQ ID NO: 39188 - DNA, 25 bp, synthetic construct
  misc_feature 1..25: note = Oligonucleotide
  source 1..25: mol_type = other DNA
cgaaggaggtgtgggtgtcagtgag

SEQ ID NO: 39189 - DNA, 25 bp, synthetic construct
  misc_feature 1..25: note = Oligonucleotide
  source 1..25: mol_type = other DNA
cagcgaaggaggtgtgggtgtcagt

SEQ ID NO: 39190 - DNA, 25 bp, synthetic construct
  misc_feature 1..25: note = Oligonucleotide
  source 1..25: mol_type = other DNA
cgtcagcgaaggaggtgtgggtgtc

SEQ ID NO: 39191 - DNA, 25 bp, synthetic construct
  misc_feature 1..25: note = Oligonucleotide
  source 1..25: mol_type = other DNA
gtccgtcagcgaaggaggtgtgggt

SEQ ID NO: 39192 - DNA, 25 bp, synthetic construct
  misc_feature 1..25: note = Oligonucleotide
  source 1..25: mol_type = other DNA
tgtgtccgtcagcgaaggaggtgtg

SEQ ID NO: 39193 - DNA, 25 bp, synthetic construct
  misc_feature 1..25: note = Oligonucleotide
  source 1..25: mol_type = other DNA
aagtgtgtccgtcagcgaaggaggt

SEQ ID NO: 39194 - DNA, 25 bp, synthetic construct
  misc_feature 1..25: note = Oligonucleotide
  source 1..25: mol_type = other DNA
gaaaagtgtgtccgtcagcgaagga

SEQ ID NO: 39195 - DNA, 25 bp, synthetic construct
  misc_feature 1..25: note = Oligonucleotide
  source 1..25: mol_type = other DNA
gtagaaaagtgtgtccgtcagcgaa

SEQ ID NO: 39196 - DNA, 25 bp, synthetic construct
  misc_feature 1..25: note = Oligonucleotide
  source 1..25: mol_type = other DNA
cgagtagaaaagtgtgtccgtcagc

SEQ ID NO: 39197 - DNA, 25 bp, synthetic construct
  misc_feature 1..25: note = Oligonucleotide
  source 1..25: mol_type = other DNA
tctcgagtagaaaagtgtgtccgtc

SEQ ID NO: 39198 - DNA, 25 bp, synthetic construct
  misc_feature 1..25: note = Oligonucleotide
  source 1..25: mol_type = other DNA
gcttctcgagtagaaaagtgtgtcc

SEQ ID NO: 39199 - DNA, 25 bp, synthetic construct
  misc_feature 1..25: note = Oligonucleotide
  source 1..25: mol_type = other DNA
gtggcttctcgagtagaaaagtgtg

SEQ ID NO: 39200 - DNA, 25 bp, synthetic construct
  misc_feature 1..25: note = Oligonucleotide
  source 1..25: mol_type = other DNA
ctggtggcttctcgagtagaaaagt

SEQ ID NO: 39201 - DNA, 25 bp, synthetic construct
  misc_feature 1..25: note = Oligonucleotide
  source 1..25: mol_type = other DNA
gcactggtggcttctcgagtagaaa

SEQ ID NO: 39202 - DNA, 25 bp, synthetic construct
  misc_feature 1..25: note = Oligonucleotide
  source 1..25: mol_type = other DNA
gaggcactggtggcttctcgagtag

SEQ ID NO: 39203 - DNA, 25 bp, synthetic construct
  misc_feature 1..25: note = Oligonucleotide
  source 1..25: mol_type = other DNA
tgggaggcactggtggcttctcgag

SEQ ID NO: 39204 - DNA, 25 bp, synthetic construct
  misc_feature 1..25: note = Oligonucleotide
  source 1..25: mol_type = other DNA
gcttgggaggcactggtggcttctc

SEQ ID NO: 39205 - DNA, 25 bp, synthetic construct
  misc_feature 1..25: note = Oligonucleotide
  source 1..25: mol_type = other DNA
tgggcttgggaggcactggtggctt

SEQ ID NO: 39206 - DNA, 25 bp, synthetic construct
  misc_feature 1..25: note = Oligonucleotide
  source 1..25: mol_type = other DNA
gcttgggcttgggaggcactggtgg

SEQ ID NO: 39207 - DNA, 25 bp, synthetic construct
  misc_feature 1..25: note = Oligonucleotide
  source 1..25: mol_type = other DNA
tgagcttgggcttgggaggcactgg

SEQ ID NO: 39208 - DNA, 25 bp, synthetic construct
  misc_feature 1..25: note = Oligonucleotide
  source 1..25: mol_type = other DNA
acttgagcttgggcttgggaggcac

SEQ ID NO: 39209 - DNA, 25 bp, synthetic construct
  misc_feature 1..25: note = Oligonucleotide
  source 1..25: mol_type = other DNA
gggacttgagcttgggcttgggagg

SEQ ID NO: 39210 - DNA, 25 bp, synthetic construct
  misc_feature 1..25: note = Oligonucleotide
  source 1..25: mol_type = other DNA
gcggggacttgagcttgggcttggg

SEQ ID NO: 39211 - DNA, 25 bp, synthetic construct
  misc_feature 1..25: note = Oligonucleotide
  source 1..25: mol_type = other DNA
ccagcggggacttgagcttgggctt

SEQ ID NO: 39212 - DNA, 25 bp, synthetic construct
  misc_feature 1..25: note = Oligonucleotide
  source 1..25: mol_type = other DNA
tccccagcggggacttgagcttggg

SEQ ID NO: 39213 - DNA, 25 bp, synthetic construct
  misc_feature 1..25: note = Oligonucleotide
  source 1..25: mol_type = other DNA
ccttccccagcggggacttgagctt

SEQ ID NO: 39214 - DNA, 25 bp, synthetic construct
  misc_feature 1..25: note = Oligonucleotide
  source 1..25: mol_type = other DNA
gccccttccccagcggggacttgag

SEQ ID NO: 39215 - DNA, 25 bp, synthetic construct
  misc_feature 1..25: note = Oligonucleotide
  source 1..25: mol_type = other DNA
ccggccccttccccagcggggactt

SEQ ID NO: 39216 - DNA, 25 bp, synthetic construct
  misc_feature 1..25: note = Oligonucleotide
  source 1..25: mol_type = other DNA
tcaccggccccttccccagcgggga

SEQ ID NO: 39217 - DNA, 25 bp, synthetic construct
  misc_feature 1..25: note = Oligonucleotide
  source 1..25: mol_type = other DNA
aggtcaccggccccttccccagcgg

SEQ ID NO: 39218 - DNA, 25 bp, synthetic construct
  misc_feature 1..25: note = Oligonucleotide
  source 1..25: mol_type = other DNA
tgaaggtcaccggccccttccccag

SEQ ID NO: 39219 - DNA, 25 bp, synthetic construct
  misc_feature 1..25: note = Oligonucleotide
  source 1..25: mol_type = other DNA
ccctgaaggtcaccggccccttccc

SEQ ID NO: 39220 - DNA, 25 bp, synthetic construct
  misc_feature 1..25: note = Oligonucleotide
  source 1..25: mol_type = other DNA
ggtccctgaaggtcaccggcccctt

SEQ ID NO: 39221 - DNA, 25 bp, synthetic construct
  misc_feature 1..25: note = Oligonucleotide
  source 1..25: mol_type = other DNA
gcgggtccctgaaggtcaccggccc

SEQ ID NO: 39222 - DNA, 25 bp, synthetic construct
  misc_feature 1..25: note = Oligonucleotide
  source 1..25: mol_type = other DNA
gcagcgggtccctgaaggtcaccgg

SEQ ID NO: 39223 - DNA, 25 bp, synthetic construct
  misc_feature 1..25: note = Oligonucleotide
  source 1..25: mol_type = other DNA
tcagcagcgggtccctgaaggtcac

SEQ ID NO: 39224 - DNA, 25 bp, synthetic construct
  misc_feature 1..25: note = Oligonucleotide
  source 1..25: mol_type = other DNA
gcttcagcagcgggtccctgaaggt

SEQ ID NO: 39225 - DNA, 25 bp, synthetic construct
  misc_feature 1..25: note = Oligonucleotide
  source 1..25: mol_type = other DNA
actgcttcagcagcgggtccctgaa

SEQ ID NO: 39226 - DNA, 25 bp, synthetic construct
  misc_feature 1..25: note = Oligonucleotide
  source 1..25: mol_type = other DNA
aggactgcttcagcagcgggtccct

SEQ ID NO: 39227 - DNA, 25 bp, synthetic construct
  misc_feature 1..25: note = Oligonucleotide
  source 1..25: mol_type = other DNA
ccgaggactgcttcagcagcgggtc

SEQ ID NO: 39228 - DNA, 25 bp, synthetic construct
  misc_feature 1..25: note = Oligonucleotide
  source 1..25: mol_type = other DNA
tgtccgaggactgcttcagcagcgg

SEQ ID NO: 39229 - DNA, 25 bp, synthetic construct
  misc_feature 1..25: note = Oligonucleotide
  source 1..25: mol_type = other DNA
cgctgtccgaggactgcttcagcag

SEQ ID NO: 39230 - DNA, 25 bp, synthetic construct
  misc_feature 1..25: note = Oligonucleotide
  source 1..25: mol_type = other DNA
gctcgctgtccgaggactgcttcag

SEQ ID NO: 39231 - DNA, 25 bp, synthetic construct
  misc_feature 1..25: note = Oligonucleotide
  source 1..25: mol_type = other DNA
tgagctcgctgtccgaggactgctt

SEQ ID NO: 39232 - DNA, 25 bp, synthetic construct
  misc_feature 1..25: note = Oligonucleotide
  source 1..25: mol_type = other DNA
ccatgagctcgctgtccgaggactg

SEQ ID NO: 39233 - DNA, 25 bp, synthetic construct
  misc_feature 1..25: note = Oligonucleotide
  source 1..25: mol_type = other DNA
gggccatgagctcgctgtccgagga

SEQ ID NO: 39234 - DNA, 25 bp, synthetic construct
  misc_feature 1..25: note = Oligonucleotide
  source 1..25: mol_type = other DNA
gctgggccatgagctcgctgtccga

SEQ ID NO: 39235 - DNA, 25 bp, synthetic construct
  misc_feature 1..25: note = Oligonucleotide
  source 1..25: mol_type = other DNA
gctgctgggccatgagctcgctgtc

SEQ ID NO: 39236 - DNA, 25 bp, synthetic construct
  misc_feature 1..25: note = Oligonucleotide
  source 1..25: mol_type = other DNA
ggtgctgctgggccatgagctcgct

SEQ ID NO: 39237 - DNA, 25 bp, synthetic construct
  misc_feature 1..25: note = Oligonucleotide
  source 1..25: mol_type = other DNA
cgtggtgctgctgggccatgagctc

SEQ ID NO: 39238 - DNA, 25 bp, synthetic construct
  misc_feature 1..25: note = Oligonucleotide
  source 1..25: mol_type = other DNA
cggcgtggtgctgctgggccatgag

SEQ ID NO: 39239 - DNA, 25 bp, synthetic construct
  misc_feature 1..25: note = Oligonucleotide
  source 1..25: mol_type = other DNA
aggcggcgtggtgctgctgggccat

SEQ ID NO: 39240 - DNA, 25 bp, synthetic construct
  misc_feature 1..25: note = Oligonucleotide
  source 1..25: mol_type = other DNA
cagaggcggcgtggtgctgctgggc

SEQ ID NO: 39241 - DNA, 25 bp, synthetic construct
  misc_feature 1..25: note = Oligonucleotide
  source 1..25: mol_type = other DNA
cggcagaggcggcgtggtgctgctg

SEQ ID NO: 39242 - DNA, 25 bp, synthetic construct
  misc_feature 1..25: note = Oligonucleotide
  source 1..25: mol_type = other DNA
gcccggcagaggcggcgtggtgctg

SEQ ID NO: 39243 - DNA, 25 bp, synthetic construct
  misc_feature 1..25: note = Oligonucleotide
  source 1..25: mol_type = other DNA
ccagcccggcagaggcggcgtggtg

SEQ ID NO: 39244 - DNA, 25 bp, synthetic construct
  misc_feature 1..25: note = Oligonucleotide
  source 1..25: mol_type = other DNA
aggccagcccggcagaggcggcgtg

SEQ ID NO: 39245 - DNA, 25 bp, synthetic construct
  misc_feature 1..25: note = Oligonucleotide
  source 1..25: mol_type = other DNA
cagaggccagcccggcagaggcggc

SEQ ID NO: 39246 - DNA, 25 bp, synthetic construct
  misc_feature 1..25: note = Oligonucleotide
  source 1..25: mol_type = other DNA
cggcagaggccagcccggcagaggc

SEQ ID NO: 39247 - DNA, 25 bp, synthetic construct
  misc_feature 1..25: note = Oligonucleotide
  source 1..25: mol_type = other DNA
cggcggcagaggccagcccggcaga

SEQ ID NO: 39248 - DNA, 25 bp, synthetic construct
  misc_feature 1..25: note = Oligonucleotide
  source 1..25: mol_type = other DNA
gcccggcggcagaggccagcccggc

SEQ ID NO: 39249 - DNA, 25 bp, synthetic construct
  misc_feature 1..25: note = Oligonucleotide
  source 1..25: mol_type = other DNA
caggcccggcggcagaggccagccc

SEQ ID NO: 39250 - DNA, 25 bp, synthetic construct
  misc_feature 1..25: note = Oligonucleotide
  source 1..25: mol_type = other DNA
gggcaggcccggcggcagaggccag

SEQ ID NO: 39251 - DNA, 25 bp, synthetic construct
  misc_feature 1..25: note = Oligonucleotide
  source 1..25: mol_type = other DNA
ggcgggcaggcccggcggcagaggc

SEQ ID NO: 39252 - DNA, 25 bp, synthetic construct
  misc_feature 1..25: note = Oligonucleotide
  source 1..25: mol_type = other DNA
gagggcgggcaggcccggcggcaga

SEQ ID NO: 39253 - DNA, 25 bp, synthetic construct
  misc_feature 1..25: note = Oligonucleotide
  source 1..25: mol_type = other DNA
agcgagggcgggcaggcccggcggc

SEQ ID NO: 39254 - DNA, 25 bp, synthetic construct
  misc_feature 1..25: note = Oligonucleotide
  source 1..25: mol_type = other DNA
ggtagcgagggcgggcaggcccggc

SEQ ID NO: 39255 - DNA, 25 bp, synthetic construct
  misc_feature 1..25: note = Oligonucleotide
  source 1..25: mol_type = other DNA
agaggtagcgagggcgggcaggccc

SEQ ID NO: 39256 - DNA, 25 bp, synthetic construct
  misc_feature 1..25: note = Oligonucleotide
  source 1..25: mol_type = other DNA
ggaagaggtagcgagggcgggcagg

SEQ ID NO: 39257 - DNA, 25 bp, synthetic construct
  misc_feature 1..25: note = Oligonucleotide
  source 1..25: mol_type = other DNA
tctggaagaggtagcgagggcgggc

SEQ ID NO: 39258 - DNA, 25 bp, synthetic construct
  misc_feature 1..25: note = Oligonucleotide
  source 1..25: mol_type = other DNA
ttctctggaagaggtagcgagggcg

SEQ ID NO: 39259 - DNA, 25 bp, synthetic construct
  misc_feature 1..25: note = Oligonucleotide
  source 1..25: mol_type = other DNA
accttctctggaagaggtagcgagg

SEQ ID NO: 39260 - DNA, 25 bp, synthetic construct
  misc_feature 1..25: note = Oligonucleotide
  source 1..25: mol_type = other DNA
tggaccttctctggaagaggtagcg

SEQ ID NO: 39261 - DNA, 25 bp, synthetic construct
  misc_feature 1..25: note = Oligonucleotide
  source 1..25: mol_type = other DNA
gcttggaccttctctggaagaggta

SEQ ID NO: 39262 - DNA, 25 bp, synthetic construct
  misc_feature 1..25: note = Oligonucleotide
  source 1..25: mol_type = other DNA
atagcttggaccttctctggaagag

SEQ ID NO: 39263 - DNA, 25 bp, synthetic construct
  misc_feature 1..25: note = Oligonucleotide
  source 1..25: mol_type = other DNA
cccatagcttggaccttctctggaa

SEQ ID NO: 39264 - DNA, 25 bp, synthetic construct
  misc_feature 1..25: note = Oligonucleotide
  source 1..25: mol_type = other DNA
ccccccatagcttggaccttctctg

SEQ ID NO: 39265 - DNA, 25 bp, synthetic construct
  misc_feature 1..25: note = Oligonucleotide
  source 1..25: mol_type = other DNA
ggtccccccatagcttggaccttct

SEQ ID NO: 39266 - DNA, 25 bp, synthetic construct
  misc_feature 1..25: note = Oligonucleotide
  source 1..25: mol_type = other DNA
cggggtccccccatagcttggacct

SEQ ID NO: 39267 - DNA, 25 bp, synthetic construct
  misc_feature 1..25: note = Oligonucleotide
  source 1..25: mol_type = other DNA
ccacggggtccccccatagcttgga

SEQ ID NO: 39268 - DNA, 25 bp, synthetic construct
  misc_feature 1..25: note = Oligonucleotide
  source 1..25: mol_type = other DNA
tctccacggggtccccccatagctt

SEQ ID NO: 39269 - DNA, 25 bp, synthetic construct
  misc_feature 1..25: note = Oligonucleotide
  source 1..25: mol_type = other DNA
ggctctccacggggtccccccatag

SEQ ID NO: 39270 - DNA, 25 bp, synthetic construct
  misc_feature 1..25: note = Oligonucleotide
  source 1..25: mol_type = other DNA
cccggctctccacggggtcccccca

SEQ ID NO: 39271 - DNA, 25 bp, synthetic construct
  misc_feature 1..25: note = Oligonucleotide
  source 1..25: mol_type = other DNA
gcccccggctctccacggggtcccc

SEQ ID NO: 39272 - DNA, 25 bp, synthetic construct
  misc_feature 1..25: note = Oligonucleotide
  source 1..25: mol_type = other DNA
ggagcccccggctctccacggggtc

SEQ ID NO: 39273 - DNA, 25 bp, synthetic construct
  misc_feature 1..25: note = Oligonucleotide
  source 1..25: mol_type = other DNA
cagggagcccccggctctccacggg

SEQ ID NO: 39274 - DNA, 25 bp, synthetic construct
  misc_feature 1..25: note = Oligonucleotide
  source 1..25: mol_type = other DNA
gcccagggagcccccggctctccac

SEQ ID NO: 39275 - DNA, 25 bp, synthetic construct
  misc_feature 1..25: note = Oligonucleotide
  source 1..25: mol_type = other DNA
caggcccagggagcccccggctctc

SEQ ID NO: 39276 - DNA, 25 bp, synthetic construct
  misc_feature 1..25: note = Oligonucleotide
  source 1..25: mol_type = other DNA
cttcaggcccagggagcccccggct

SEQ ID NO: 39277 - DNA, 25 bp, synthetic construct
  misc_feature 1..25: note = Oligonucleotide
  source 1..25: mol_type = other DNA
cgtcttcaggcccagggagcccccg

SEQ ID NO: 39278 - DNA, 25 bp, synthetic construct
  misc_feature 1..25: note = Oligonucleotide
  source 1..25: mol_type = other DNA
tgtcgtcttcaggcccagggagccc

SEQ ID NO: 39279 - DNA, 25 bp, synthetic construct
  misc_feature 1..25: note = Oligonucleotide
  source 1..25: mol_type = other DNA
gtttgtcgtcttcaggcccagggag

SEQ ID NO: 39280 - DNA, 25 bp, synthetic construct
  misc_feature 1..25: note = Oligonucleotide
  source 1..25: mol_type = other DNA
ttggtttgtcgtcttcaggcccagg

SEQ ID NO: 39281 - DNA, 25 bp, synthetic construct
  misc_feature 1..25: note = Oligonucleotide
  source 1..25: mol_type = other DNA
cagttggtttgtcgtcttcaggccc

SEQ ID NO: 39282 - DNA, 25 bp, synthetic construct
  misc_feature 1..25: note = Oligonucleotide
  source 1..25: mol_type = other DNA
tcacagttggtttgtcgtcttcagg

SEQ ID NO: 39283 - DNA, 25 bp, synthetic construct
  misc_feature 1..25: note = Oligonucleotide
  source 1..25: mol_type = other DNA
tgatcacagttggtttgtcgtcttc

SEQ ID NO: 39284 - DNA, 25 bp, synthetic construct
  misc_feature 1..25: note = Oligonucleotide
  source 1..25: mol_type = other DNA
cactgatcacagttggtttgtcgtc

SEQ ID NO: 39285 - DNA, 25 bp, synthetic construct
  misc_feature 1..25: note = Oligonucleotide
  source 1..25: mol_type = other DNA
gctcactgatcacagttggtttgtc

SEQ ID NO: 39286 - DNA, 25 bp, synthetic construct
  misc_feature 1..25: note = Oligonucleotide
  source 1..25: mol_type = other DNA
tgagctcactgatcacagttggttt

SEQ ID NO: 39287 - DNA, 25 bp, synthetic construct
  misc_feature 1..25: note = Oligonucleotide
  source 1..25: mol_type = other DNA
agctgagctcactgatcacagttgg

SEQ ID NO: 39288 - DNA, 25 bp, synthetic construct
  misc_feature 1..25: note = Oligonucleotide
  source 1..25: mol_type = other DNA
gggagctgagctcactgatcacagt

SEQ ID NO: 39289 - DNA, 25 bp, synthetic construct
  misc_feature 1..25: note = Oligonucleotide
  source 1..25: mol_type = other DNA
ggcgggagctgagctcactgatcac

SEQ ID NO: 39290 - DNA, 25 bp, synthetic construct
  misc_feature 1..25: note = Oligonucleotide
  source 1..25: mol_type = other DNA
gcaggcgggagctgagctcactgat

SEQ ID NO: 39291 - DNA, 25 bp, synthetic construct
  misc_feature 1..25: note = Oligonucleotide
  source 1..25: mol_type = other DNA
gctgcaggcgggagctgagctcact

SEQ ID NO: 39292 - DNA, 25 bp, synthetic construct
  misc_feature 1..25: note = Oligonucleotide
  source 1..25: mol_type = other DNA
gctgctgcaggcgggagctgagctc

SEQ ID NO: 39293 - DNA, 25 bp, synthetic construct
  misc_feature 1..25: note = Oligonucleotide
  source 1..25: mol_type = other DNA
tcagctgctgcaggcgggagctgag

SEQ ID NO: 39294 - DNA, 25 bp, synthetic construct
  misc_feature 1..25: note = Oligonucleotide
  source 1..25: mol_type = other DNA
tgttcagctgctgcaggcgggagct

SEQ ID NO: 39295 - DNA, 25 bp, synthetic construct
  misc_feature 1..25: note = Oligonucleotide
  source 1..25: mol_type = other DNA
ccttgttcagctgctgcaggcggga

SEQ ID NO: 39296 - DNA, 25 bp, synthetic construct
  misc_feature 1..25: note = Oligonucleotide
  source 1..25: mol_type = other DNA
tgtccttgttcagctgctgcaggcg

SEQ ID NO: 39297 - DNA, 25 bp, synthetic construct
  misc_feature 1..25: note = Oligonucleotide
  source 1..25: mol_type = other DNA
gcgtgtccttgttcagctgctgcag

SEQ ID NO: 39298 - DNA, 25 bp, synthetic construct
  misc_feature 1..25: note = Oligonucleotide
  source 1..25: mol_type = other DNA
aacgcgtgtccttgttcagctgctg

SEQ ID NO: 39299 - DNA, 25 bp, synthetic construct
  misc_feature 1..25: note = Oligonucleotide
  source 1..25: mol_type = other DNA
gggaacgcgtgtccttgttcagctg

SEQ ID NO: 39300 - DNA, 25 bp, synthetic construct
  misc_feature 1..25: note = Oligonucleotide
  source 1..25: mol_type = other DNA
ccagggaacgcgtgtccttgttcag

SEQ ID NO: 39301 - DNA, 25 bp, synthetic construct
  misc_feature 1..25: note = Oligonucleotide
  source 1..25: mol_type = other DNA
cccccagggaacgcgtgtccttgtt

SEQ ID NO: 39302 - DNA, 25 bp, synthetic construct
  misc_feature 1..25: note = Oligonucleotide
  source 1..25: mol_type = other DNA
cctcccccagggaacgcgtgtcctt

SEQ ID NO: 39303 - DNA, 25 bp, synthetic construct
  misc_feature 1..25: note = Oligonucleotide
  source 1..25: mol_type = other DNA
gttcctcccccagggaacgcgtgtc

SEQ ID NO: 39304 - DNA, 25 bp, synthetic construct
  misc_feature 1..25: note = Oligonucleotide
  source 1..25: mol_type = other DNA
ctggttcctcccccagggaacgcgt

SEQ ID NO: 39305 - DNA, 25 bp, synthetic construct
  misc_feature 1..25: note = Oligonucleotide
  source 1..25: mol_type = other DNA
caactggttcctcccccagggaacg

SEQ ID NO: 39306 - DNA, 25 bp, synthetic construct
  misc_feature 1..25: note = Oligonucleotide
  source 1..25: mol_type = other DNA
caccaactggttcctcccccaggga

SEQ ID NO: 39307 - DNA, 25 bp, synthetic construct
  misc_feature 1..25: note = Oligonucleotide
  source 1..25: mol_type = other DNA
ggccaccaactggttcctcccccag

SEQ ID NO: 39308 - DNA, 25 bp, synthetic construct
  misc_feature 1..25: note = Oligonucleotide
  source 1..25: mol_type = other DNA
ccaggccaccaactggttcctcccc

SEQ ID NO: 39309 - DNA, 25 bp, synthetic construct
  misc_feature 1..25: note = Oligonucleotide
  source 1..25: mol_type = other DNA
tgcccaggccaccaactggttcctc

SEQ ID NO: 39310 - DNA, 25 bp, synthetic construct
  misc_feature 1..25: note = Oligonucleotide
  source 1..25: mol_type = other DNA
ggctgcccaggccaccaactggttc

SEQ ID NO: 39311 - DNA, 25 bp, synthetic construct
  misc_feature 1..25: note = Oligonucleotide
  source 1..25: mol_type = other DNA
gcaggctgcccaggccaccaactgg

SEQ ID NO: 39312 - DNA, 25 bp, synthetic construct
  misc_feature 1..25: note = Oligonucleotide
  source 1..25: mol_type = other DNA
ccagcaggctgcccaggccaccaac

SEQ ID NO: 39313 - DNA, 25 bp, synthetic construct
  misc_feature 1..25: note = Oligonucleotide
  source 1..25: mol_type = other DNA
ggtccagcaggctgcccaggccacc

SEQ ID NO: 39314 - DNA, 25 bp, synthetic construct
  misc_feature 1..25: note = Oligonucleotide
  source 1..25: mol_type = other DNA
cagggtccagcaggctgcccaggcc

SEQ ID NO: 39315 - DNA, 25 bp, synthetic construct
  misc_feature 1..25: note = Oligonucleotide
  source 1..25: mol_type = other DNA
tggcagggtccagcaggctgcccag

SEQ ID NO: 39316 - DNA, 25 bp, synthetic construct
  misc_feature 1..25: note = Oligonucleotide
  source 1..25: mol_type = other DNA
tcttggcagggtccagcaggctgcc

SEQ ID NO: 39317 - DNA, 25 bp, synthetic construct
  misc_feature 1..25: note = Oligonucleotide
  source 1..25: mol_type = other DNA
acttcttggcagggtccagcaggct

SEQ ID NO: 39318 - DNA, 25 bp, synthetic construct
  misc_feature 1..25: note = Oligonucleotide
  source 1..25: mol_type = other DNA
gcgacttcttggcagggtccagcag

SEQ ID NO: 39319 - DNA, 25 bp, synthetic construct
  misc_feature 1..25: note = Oligonucleotide
  source 1..25: mol_type = other DNA
tgggcgacttcttggcagggtccag

SEQ ID NO: 39320 - DNA, 25 bp, synthetic construct
  misc_feature 1..25: note = Oligonucleotide
  source 1..25: mol_type = other DNA
cgatgggcgacttcttggcagggtc

SEQ ID NO: 39321 - DNA, 25 bp, synthetic construct
  misc_feature 1..25: note = Oligonucleotide
  source 1..25: mol_type = other DNA
ctgcgatgggcgacttcttggcagg

SEQ ID NO: 39322 - DNA, 25 bp, synthetic construct
  misc_feature 1..25: note = Oligonucleotide
  source 1..25: mol_type = other DNA
ctgctgcgatgggcgacttcttggc

SEQ ID NO: 39323 - DNA, 25 bp, synthetic construct
  misc_feature 1..25: note = Oligonucleotide
  source 1..25: mol_type = other DNA
gagctgctgcgatgggcgacttctt

SEQ ID NO: 39324 - DNA, 25 bp, synthetic construct
  misc_feature 1..25: note = Oligonucleotide
  source 1..25: mol_type = other DNA
accgagctgctgcgatgggcgactt

SEQ ID NO: 39325 - DNA, 25 bp, synthetic construct
  misc_feature 1..25: note = Oligonucleotide
  source 1..25: mol_type = other DNA
ctcaccgagctgctgcgatgggcga

SEQ ID NO: 39326 - DNA, 25 bp, synthetic construct
  misc_feature 1..25: note = Oligonucleotide
  source 1..25: mol_type = other DNA
ctgctcaccgagctgctgcgatggg

SEQ ID NO: 39327 - DNA, 25 bp, synthetic construct
  misc_feature 1..25: note = Oligonucleotide
  source 1..25: mol_type = other DNA
gccctgctcaccgagctgctgcgat

SEQ ID NO: 39328 - DNA, 25 bp, synthetic construct
  misc_feature 1..25: note = Oligonucleotide
  source 1..25: mol_type = other DNA
accgccctgctcaccgagctgctgc

SEQ ID NO: 39329 - DNA, 25 bp, synthetic construct
  misc_feature 1..25: note = Oligonucleotide
  source 1..25: mol_type = other DNA
cgcaccgccctgctcaccgagctgc

SEQ ID NO: 39330 - DNA, 25 bp, synthetic construct
  misc_feature 1..25: note = Oligonucleotide
  source 1..25: mol_type = other DNA
ccccgcaccgccctgctcaccgagc

SEQ ID NO: 39331 - DNA, 25 bp, synthetic construct
  misc_feature 1..25: note = Oligonucleotide
  source 1..25: mol_type = other DNA
cctccccgcaccgccctgctcaccg

SEQ ID NO: 39332 - DNA, 25 bp, synthetic construct
  misc_feature 1..25: note = Oligonucleotide
  source 1..25: mol_type = other DNA
gcctgcggagggagaggggtcagcg

SEQ ID NO: 39333 - DNA, 25 bp, synthetic construct
  misc_feature 1..25: note = Oligonucleotide
  source 1..25: mol_type = other DNA
agagcctgcggagggagaggggtca

SEQ ID NO: 39334 - DNA, 25 bp, synthetic construct
  misc_feature 1..25: note = Oligonucleotide
  source 1..25: mol_type = other DNA
tgaagagcctgcggagggagagggg

SEQ ID NO: 39335 - DNA, 25 bp, synthetic construct
  misc_feature 1..25: note = Oligonucleotide
  source 1..25: mol_type = other DNA
tgctgaagagcctgcggagggagag

SEQ ID NO: 39336 - DNA, 25 bp, synthetic construct
  misc_feature 1..25: note = Oligonucleotide
  source 1..25: mol_type = other DNA
ggctgctgaagagcctgcggaggga

SEQ ID NO: 39337 - DNA, 25 bp, synthetic construct
  misc_feature 1..25: note = Oligonucleotide
  source 1..25: mol_type = other DNA
cgaggctgctgaagagcctgcggag

SEQ ID NO: 39338 - DNA, 25 bp, synthetic construct
  misc_feature 1..25: note = Oligonucleotide
  source 1..25: mol_type = other DNA
caccgaggctgctgaagagcctgcg

SEQ ID NO: 39339 - DNA, 25 bp, synthetic construct
  misc_feature 1..25: note = Oligonucleotide
  source 1..25: mol_type = other DNA
gctcaccgaggctgctgaagagcct

SEQ ID NO: 39340 - DNA, 25 bp, synthetic construct
  misc_feature 1..25: note = Oligonucleotide
  source 1..25: mol_type = other DNA
tcagctcaccgaggctgctgaagag

SEQ ID NO: 39341 - DNA, 25 bp, synthetic construct
  misc_feature 1..25: note = Oligonucleotide
  source 1..25: mol_type = other DNA
agctcagctcaccgaggctgctgaa

SEQ ID NO: 39342 - DNA, 25 bp, synthetic construct
  misc_feature 1..25: note = Oligonucleotide
  source 1..25: mol_type = other DNA
tggagctcagctcaccgaggctgct

SEQ ID NO: 39343 - DNA, 25 bp, synthetic construct
  misc_feature 1..25: note = Oligonucleotide
  source 1..25: mol_type = other DNA
aaatggagctcagctcaccgaggct

SEQ ID NO: 39344 - DNA, 25 bp, synthetic construct
  misc_feature 1..25: note = Oligonucleotide
  source 1..25: mol_type = other DNA
ctgaaatggagctcagctcaccgag

SEQ ID NO: 39345 - DNA, 25 bp, synthetic construct
  misc_feature 1..25: note = Oligonucleotide
  source 1..25: mol_type = other DNA
gcgctgaaatggagctcagctcacc

SEQ ID NO: 39346 - DNA, 25 bp, synthetic construct
  misc_feature 1..25: note = Oligonucleotide
  source 1..25: mol_type = other DNA
gctgcgctgaaatggagctcagctc

SEQ ID NO: 39347 - DNA, 25 bp, synthetic construct
  misc_feature 1..25: note = Oligonucleotide
  source 1..25: mol_type = other DNA
tgcgctgcgctgaaatggagctcag

SEQ ID NO: 39348 - DNA, 25 bp, synthetic construct
  misc_feature 1..25: note = Oligonucleotide
  source 1..25: mol_type = other DNA
ggctgcgctgcgctgaaatggagct

SEQ ID NO: 39349 - DNA, 25 bp, synthetic construct
  misc_feature 1..25: note = Oligonucleotide
  source 1..25: mol_type = other DNA
cggggctgcgctgcgctgaaatgga

SEQ ID NO: 39350 - DNA, 25 bp, synthetic construct
  misc_feature 1..25: note = Oligonucleotide
  source 1..25: mol_type = other DNA
ccccggggctgcgctgcgctgaaat

SEQ ID NO: 39351 - DNA, 25 bp, synthetic construct
  misc_feature 1..25: note = Oligonucleotide
  source 1..25: mol_type = other DNA
ggcccccggggctgcgctgcgctga

SEQ ID NO: 39352 - DNA, 25 bp, synthetic construct
  misc_feature 1..25: note = Oligonucleotide
  source 1..25: mol_type = other DNA
ccgggcccccggggctgcgctgcgc

SEQ ID NO: 39353 - DNA, 25 bp, synthetic construct
  misc_feature 1..25: note = Oligonucleotide
  source 1..25: mol_type = other DNA
cgcccgggcccccggggctgcgctg

SEQ ID NO: 39354 - DNA, 25 bp, synthetic construct
  misc_feature 1..25: note = Oligonucleotide
  source 1..25: mol_type = other DNA
cgccgcccgggcccccggggctgcg

SEQ ID NO: 39355 - DNA, 25 bp, synthetic construct
  misc_feature 1..25: note = Oligonucleotide
  source 1..25: mol_type = other DNA
ccccgccgcccgggcccccggggct

SEQ ID NO: 39356 - DNA, 25 bp, synthetic construct
  misc_feature 1..25: note = Oligonucleotide
  source 1..25: mol_type = other DNA
aggccccgccgcccgggcccccggg

SEQ ID NO: 39357 - DNA, 25 bp, synthetic construct
  misc_feature 1..25: note = Oligonucleotide
  source 1..25: mol_type = other DNA
acgaggccccgccgcccgggccccc

SEQ ID NO: 39358 - DNA, 25 bp, synthetic construct
  misc_feature 1..25: note = Oligonucleotide
  source 1..25: mol_type = other DNA
agtacgaggccccgccgcccgggcc

SEQ ID NO: 39359 - DNA, 25 bp, synthetic construct
  misc_feature 1..25: note = Oligonucleotide
  source 1..25: mol_type = other DNA
ccgagtacgaggccccgccgcccgg

SEQ ID NO: 39360 - DNA, 25 bp, synthetic construct
  misc_feature 1..25: note = Oligonucleotide
  source 1..25: mol_type = other DNA
tcaccgagtacgaggccccgccgcc

SEQ ID NO: 39361 - DNA, 25 bp, synthetic construct
  misc_feature 1..25: note = Oligonucleotide
  source 1..25: mol_type = other DNA
gcctcaccgagtacgaggccccgcc

SEQ ID NO: 39362 - DNA, 25 bp, synthetic construct
  misc_feature 1..25: note = Oligonucleotide
  source 1..25: mol_type = other DNA
tgggcctcaccgagtacgaggcccc

SEQ ID NO: 39363 - DNA, 25 bp, synthetic construct
  misc_feature 1..25: note = Oligonucleotide
  source 1..25: mol_type = other DNA
cactgggcctcaccgagtacgaggc

SEQ ID NO: 39364 - DNA, 25 bp, synthetic construct
  misc_feature 1..25: note = Oligonucleotide
  source 1..25: mol_type = other DNA
ggccactgggcctcaccgagtacga

SEQ ID NO: 39365 - DNA, 25 bp, synthetic construct
  misc_feature 1..25: note = Oligonucleotide
  source 1..25: mol_type = other DNA
agcggccactgggcctcaccgagta

SEQ ID NO: 39366 - DNA, 25 bp, synthetic construct
  misc_feature 1..25: note = Oligonucleotide
  source 1..25: mol_type = other DNA
ggtagcggccactgggcctcaccga

SEQ ID NO: 39367 - DNA, 25 bp, synthetic construct
  misc_feature 1..25: note = Oligonucleotide
  source 1..25: mol_type = other DNA
cggggtagcggccactgggcctcac

SEQ ID NO: 39368 - DNA, 25 bp, synthetic construct
  misc_feature 1..25: note = Oligonucleotide
  source 1..25: mol_type = other DNA
ccacggggtagcggccactgggcct

SEQ ID NO: 39369 - DNA, 25 bp, synthetic construct
  misc_feature 1..25: note = Oligonucleotide
  source 1..25: mol_type = other DNA
tcgccacggggtagcggccactggg

SEQ ID NO: 39370 - DNA, 25 bp, synthetic construct
  misc_feature 1..25: note = Oligonucleotide
  source 1..25: mol_type = other DNA
gtctcgccacggggtagcggccact

SEQ ID NO: 39371 - DNA, 25 bp, synthetic construct
  misc_feature 1..25: note = Oligonucleotide
  source 1..25: mol_type = other DNA
cgcgtctcgccacggggtagcggcc

SEQ ID NO: 39372 - DNA, 25 bp, synthetic construct
  misc_feature 1..25: note = Oligonucleotide
  source 1..25: mol_type = other DNA
gggcgcgtctcgccacggggtagcg

SEQ ID NO: 39373 - DNA, 25 bp, synthetic construct
  misc_feature 1..25: note = Oligonucleotide
  source 1..25: mol_type = other DNA
tcggggcgcgtctcgccacggggta

SEQ ID NO: 39374 - DNA, 25 bp, synthetic construct
  misc_feature 1..25: note = Oligonucleotide
  source 1..25: mol_type = other DNA
ggctcggggcgcgtctcgccacggg

SEQ ID NO: 39375 - DNA, 25 bp, synthetic construct
  misc_feature 1..25: note = Oligonucleotide
  source 1..25: mol_type = other DNA
ccgggctcggggcgcgtctcgccac

SEQ ID NO: 39376 - DNA, 25 bp, synthetic construct
  misc_feature 1..25: note = Oligonucleotide
  source 1..25: mol_type = other DNA
tcaccgggctcggggcgcgtctcgc

SEQ ID NO: 39377 - DNA, 25 bp, synthetic construct
  misc_feature 1..25: note = Oligonucleotide
  source 1..25: mol_type = other DNA
gcttcaccgggctcggggcgcgtct

SEQ ID NO: 39378 - DNA, 25 bp, synthetic construct
  misc_feature 1..25: note = Oligonucleotide
  source 1..25: mol_type = other DNA
cgggcttcaccgggctcggggcgcg

SEQ ID NO: 39379 - DNA, 25 bp, synthetic construct
  misc_feature 1..25: note = Oligonucleotide
  source 1..25: mol_type = other DNA
acgcgggcttcaccgggctcggggc

SEQ ID NO: 39380 - DNA, 25 bp, synthetic construct
  misc_feature 1..25: note = Oligonucleotide
  source 1..25: mol_type = other DNA
gcgacgcgggcttcaccgggctcgg

SEQ ID NO: 39381 - DNA, 25 bp, synthetic construct
  misc_feature 1..25: note = Oligonucleotide
  source 1..25: mol_type = other DNA
ccagcgacgcgggcttcaccgggct

SEQ ID NO: 39382 - DNA, 25 bp, synthetic construct
  misc_feature 1..25: note = Oligonucleotide
  source 1..25: mol_type = other DNA
gctccagcgacgcgggcttcaccgg

SEQ ID NO: 39383 - DNA, 25 bp, synthetic construct
  misc_feature 1..25: note = Oligonucleotide
  source 1..25: mol_type = other DNA
cccgctccagcgacgcgggcttcac

SEQ ID NO: 39384 - DNA, 25 bp, synthetic construct
  misc_feature 1..25: note = Oligonucleotide
  source 1..25: mol_type = other DNA
ccacccgctccagcgacgcgggctt

SEQ ID NO: 39385 - DNA, 25 bp, synthetic construct
  misc_feature 1..25: note = Oligonucleotide
  source 1..25: mol_type = other DNA
cctccacccgctccagcgacgcggg

SEQ ID NO: 39386 - DNA, 25 bp, synthetic construct
  misc_feature 1..25: note = Oligonucleotide
  source 1..25: mol_type = other DNA
gcccctccacccgctccagcgacgc

SEQ ID NO: 39387 - DNA, 25 bp, synthetic construct
  misc_feature 1..25: note = Oligonucleotide
  source 1..25: mol_type = other DNA
ccagcccctccacccgctccagcga

SEQ ID NO: 39388 - DNA, 25 bp, synthetic construct
  misc_feature 1..25: note = Oligonucleotide
  source 1..25: mol_type = other DNA
cccccagcccctccacccgctccag

SEQ ID NO: 39389 - DNA, 25 bp, synthetic construct
  misc_feature 1..25: note = Oligonucleotide
  source 1..25: mol_type = other DNA
ccgcccccagcccctccacccgctc

SEQ ID NO: 39390 - DNA, 25 bp, synthetic construct
  misc_feature 1..25: note = Oligonucleotide
  source 1..25: mol_type = other DNA
cgcccgcccccagcccctccacccg

SEQ ID NO: 39391 - DNA, 25 bp, synthetic construct
  misc_feature 1..25: note = Oligonucleotide
  source 1..25: mol_type = other DNA
ccgcgcccgcccccagcccctccac

SEQ ID NO: 39392 - DNA, 25 bp, synthetic construct
  misc_feature 1..25: note = Oligonucleotide
  source 1..25: mol_type = other DNA
cccccgcgcccgcccccagcccctc

SEQ ID NO: 39393 - DNA, 25 bp, synthetic construct
  misc_feature 1..25: note = Oligonucleotide
  source 1..25: mol_type = other DNA
cgccccccgcgcccgcccccagccc

SEQ ID NO: 39394 - DNA, 25 bp, synthetic construct
  misc_feature 1..25: note = Oligonucleotide
  source 1..25: mol_type = other DNA
ctgcgccccccgcgcccgcccccag

SEQ ID NO: 39395 - DNA, 25 bp, synthetic construct
  misc_feature 1..25: note = Oligonucleotide
  source 1..25: mol_type = other DNA
gccctgcgccccccgcgcccgcccc

SEQ ID NO: 39396 - DNA, 25 bp, synthetic construct
  misc_feature 1..25: note = Oligonucleotide
  source 1..25: mol_type = other DNA
gccgccctgcgccccccgcgcccgc

SEQ ID NO: 39397 - DNA, 25 bp, synthetic construct
  misc_feature 1..25: note = Oligonucleotide
  source 1..25: mol_type = other DNA
agggccgccctgcgccccccgcgcc

SEQ ID NO: 39398 - DNA, 25 bp, synthetic construct
  misc_feature 1..25: note = Oligonucleotide
  source 1..25: mol_type = other DNA
cgaagggccgccctgcgccccccgc

SEQ ID NO: 39399 - DNA, 25 bp, synthetic construct
  misc_feature 1..25: note = Oligonucleotide
  source 1..25: mol_type = other DNA
ggccgaagggccgccctgcgccccc

SEQ ID NO: 39400 - DNA, 25 bp, synthetic construct
  misc_feature 1..25: note = Oligonucleotide
  source 1..25: mol_type = other DNA
tgaggccgaagggccgccctgcgcc

SEQ ID NO: 39401 - DNA, 25 bp, synthetic construct
  misc_feature 1..25: note = Oligonucleotide
  source 1..25: mol_type = other DNA
gcgtgaggccgaagggccgccctgc

SEQ ID NO: 39402 - DNA, 25 bp, synthetic construct
  misc_feature 1..25: note = Oligonucleotide
  source 1..25: mol_type = other DNA
ggggcgtgaggccgaagggccgccc

SEQ ID NO: 39403 - DNA, 25 bp, synthetic construct
  misc_feature 1..25: note = Oligonucleotide
  source 1..25: mol_type = other DNA
tggggggcgtgaggccgaagggccg

SEQ ID NO: 39404 - DNA, 25 bp, synthetic construct
  misc_feature 1..25: note = Oligonucleotide
  source 1..25: mol_type = other DNA
tggtggggggcgtgaggccgaaggg

SEQ ID NO: 39405 - DNA, 25 bp, synthetic construct
  misc_feature 1..25: note = Oligonucleotide
  source 1..25: mol_type = other DNA
ggatggtggggggcgtgaggccgaa

SEQ ID NO: 39406 - DNA, 25 bp, synthetic construct
  misc_feature 1..25: note = Oligonucleotide
  source 1..25: mol_type = other DNA
tgaggatggtggggggcgtgaggcc

SEQ ID NO: 39407 - DNA, 25 bp, synthetic construct
  misc_feature 1..25: note = Oligonucleotide
  source 1..25: mol_type = other DNA
acttgaggatggtggggggcgtgag

SEQ ID NO: 39408 - DNA, 25 bp, synthetic construct
  misc_feature 1..25: note = Oligonucleotide
  source 1..25: mol_type = other DNA
acgacttgaggatggtggggggcgt

SEQ ID NO: 39409 - DNA, 25 bp, synthetic construct
  misc_feature 1..25: note = Oligonucleotide
  source 1..25: mol_type = other DNA
tggacgacttgaggatggtgggggg

SEQ ID NO: 39410 - DNA, 25 bp, synthetic construct
  misc_feature 1..25: note = Oligonucleotide
  source 1..25: mol_type = other DNA
ggctggacgacttgaggatggtggg

SEQ ID NO: 39411 - DNA, 25 bp, synthetic construct
  misc_feature 1..25: note = Oligonucleotide
  source 1..25: mol_type = other DNA
agaggctggacgacttgaggatggt

SEQ ID NO: 39412 - DNA, 25 bp, synthetic construct
  misc_feature 1..25: note = Oligonucleotide
  source 1..25: mol_type = other DNA
tggagaggctggacgacttgaggat

SEQ ID NO: 39413 - DNA, 25 bp, synthetic construct
  misc_feature 1..25: note = Oligonucleotide
  source 1..25: mol_type = other DNA
ggatggagaggctggacgacttgag

SEQ ID NO: 39414 - DNA, 25 bp, synthetic construct
  misc_feature 1..25: note = Oligonucleotide
  source 1..25: mol_type = other DNA
gcgggatggagaggctggacgactt

SEQ ID NO: 39415 - DNA, 25 bp, synthetic construct
  misc_feature 1..25: note = Oligonucleotide
  source 1..25: mol_type = other DNA
cgtgcgggatggagaggctggacga

SEQ ID NO: 39416 - DNA, 25 bp, synthetic construct
  misc_feature 1..25: note = Oligonucleotide
  source 1..25: mol_type = other DNA
gctcgtgcgggatggagaggctgga

SEQ ID NO: 39417 - DNA, 25 bp, synthetic construct
  misc_feature 1..25: note = Oligonucleotide
  source 1..25: mol_type = other DNA
tgggctcgtgcgggatggagaggct

SEQ ID NO: 39418 - DNA, 25 bp, synthetic construct
  misc_feature 1..25: note = Oligonucleotide
  source 1..25: mol_type = other DNA
ccttgggctcgtgcgggatggagag

SEQ ID NO: 39419 - DNA, 25 bp, synthetic construct
  misc_feature 1..25: note = Oligonucleotide
  source 1..25: mol_type = other DNA
cctccttgggctcgtgcgggatgga

SEQ ID NO: 39420 - DNA, 25 bp, synthetic construct
  misc_feature 1..25: note = Oligonucleotide
  source 1..25: mol_type = other DNA
gcacctccttgggctcgtgcgggat

SEQ ID NO: 39421 - DNA, 25 bp, synthetic construct
  misc_feature 1..25: note = Oligonucleotide
  source 1..25: mol_type = other DNA
agcgcacctccttgggctcgtgcgg

SEQ ID NO: 39422 - DNA, 25 bp, synthetic construct
  misc_feature 1..25: note = Oligonucleotide
  source 1..25: mol_type = other DNA
cgaagcgcacctccttgggctcgtg

SEQ ID NO: 39423 - DNA, 25 bp, synthetic construct
  misc_feature 1..25: note = Oligonucleotide
  source 1..25: mol_type = other DNA
ccacgaagcgcacctccttgggctc

SEQ ID NO: 39424 - DNA, 25 bp, synthetic construct
  misc_feature 1..25: note = Oligonucleotide
  source 1..25: mol_type = other DNA
gcaccacgaagcgcacctccttggg

SEQ ID NO: 39425 - DNA, 25 bp, synthetic construct
  misc_feature 1..25: note = Oligonucleotide
  source 1..25: mol_type = other DNA
tgcgcaccacgaagcgcacctcctt

SEQ ID NO: 39426 - DNA, 25 bp, synthetic construct
  misc_feature 1..25: note = Oligonucleotide
  source 1..25: mol_type = other DNA
cgctgcgcaccacgaagcgcacctc

SEQ ID NO: 39427 - DNA, 25 bp, synthetic construct
  misc_feature 1..25: note = Oligonucleotide
  source 1..25: mol_type = other DNA
tcacgctgcgcaccacgaagcgcac

SEQ ID NO: 39428 - DNA, 25 bp, synthetic construct
  misc_feature 1..25: note = Oligonucleotide
  source 1..25: mol_type = other DNA
cgctcacgctgcgcaccacgaagcg

SEQ ID NO: 39429 - DNA, 25 bp, synthetic construct
  misc_feature 1..25: note = Oligonucleotide
  source 1..25: mol_type = other DNA
gcgcgctcacgctgcgcaccacgaa

SEQ ID NO: 39430 - DNA, 25 bp, synthetic construct
  misc_feature 1..25: note = Oligonucleotide
  source 1..25: mol_type = other DNA
tgcgcgcgctcacgctgcgcaccac

SEQ ID NO: 39431 - DNA, 25 bp, synthetic construct
  misc_feature 1..25: note = Oligonucleotide
  source 1..25: mol_type = other DNA
gactgcgcgcgctcacgctgcgcac

SEQ ID NO: 39432 - DNA, 25 bp, synthetic construct
  misc_feature 1..25: note = Oligonucleotide
  source 1..25: mol_type = other DNA
agcgactgcgcgcgctcacgctgcg

SEQ ID NO: 39433 - DNA, 25 bp, synthetic construct
  misc_feature 1..25: note = Oligonucleotide
  source 1..25: mol_type = other DNA
gggagcgactgcgcgcgctcacgct

SEQ ID NO: 39434 - DNA, 25 bp, synthetic construct
  misc_feature 1..25: note = Oligonucleotide
  source 1..25: mol_type = other DNA
agggggagcgactgcgcgcgctcac

SEQ ID NO: 39435 - DNA, 25 bp, synthetic construct
  misc_feature 1..25: note = Oligonucleotide
  source 1..25: mol_type = other DNA
gcgagggggagcgactgcgcgcgct

SEQ ID NO: 39436 - DNA, 25 bp, synthetic construct
  misc_feature 1..25: note = Oligonucleotide
  source 1..25: mol_type = other DNA
acggcgagggggagcgactgcgcgc

SEQ ID NO: 39437 - DNA, 25 bp, synthetic construct
  misc_feature 1..25: note = Oligonucleotide
  source 1..25: mol_type = other DNA
gcgacggcgagggggagcgactgcg

SEQ ID NO: 39438 - DNA, 25 bp, synthetic construct
  misc_feature 1..25: note = Oligonucleotide
  source 1..25: mol_type = other DNA
gcggcgacggcgagggggagcgact

SEQ ID NO: 39439 - DNA, 25 bp, synthetic construct
  misc_feature 1..25: note = Oligonucleotide
  source 1..25: mol_type = other DNA
gcagcggcgacggcgagggggagcg

SEQ ID NO: 39440 - DNA, 25 bp, synthetic construct
  misc_feature 1..25: note = Oligonucleotide
  source 1..25: mol_type = other DNA
agggcagcggcgacggcgaggggga

SEQ ID NO: 39441 - DNA, 25 bp, synthetic construct
  misc_feature 1..25: note = Oligonucleotide
  source 1..25: mol_type = other DNA
gcgagggcagcggcgacggcgaggg

SEQ ID NO: 39442 - DNA, 25 bp, synthetic construct
  misc_feature 1..25: note = Oligonucleotide
  source 1..25: mol_type = other DNA
cgggcgagggcagcggcgacggcga

SEQ ID NO: 39443 - DNA, 25 bp, synthetic construct
  misc_feature 1..25: note = Oligonucleotide
  source 1..25: mol_type = other DNA
acgcgggcgagggcagcggcgacgg

SEQ ID NO: 39444 - DNA, 25 bp, synthetic construct
  misc_feature 1..25: note = Oligonucleotide
  source 1..25: mol_type = other DNA
cggacgcgggcgagggcagcggcga

SEQ ID NO: 39445 - DNA, 25 bp, synthetic construct
  misc_feature 1..25: note = Oligonucleotide
  source 1..25: mol_type = other DNA
ggccggacgcgggcgagggcagcgg

SEQ ID NO: 39446 - DNA, 25 bp, synthetic construct
  misc_feature 1..25: note = Oligonucleotide
  source 1..25: mol_type = other DNA
cggggccggacgcgggcgagggcag

SEQ ID NO: 39447 - DNA, 25 bp, synthetic construct
  misc_feature 1..25: note = Oligonucleotide
  source 1..25: mol_type = other DNA
ggccggggccggacgcgggcgaggg

SEQ ID NO: 39448 - DNA, 25 bp, synthetic construct
  misc_feature 1..25: note = Oligonucleotide
  source 1..25: mol_type = other DNA
cggggccggggccggacgcgggcga

SEQ ID NO: 39449 - DNA, 25 bp, synthetic construct
  misc_feature 1..25: note = Oligonucleotide
  source 1..25: mol_type = other DNA
cgccggggccggggccggacgcggg

SEQ ID NO: 39450 - DNA, 25 bp, synthetic construct
  misc_feature 1..25: note = Oligonucleotide
  source 1..25: mol_type = other DNA
gggcgccggggccggggccggacgc

SEQ ID NO: 39451 - DNA, 25 bp, synthetic construct
  misc_feature 1..25: note = Oligonucleotide
  source 1..25: mol_type = other DNA
cgggggcgccggggccggggccgga

SEQ ID NO: 39452 - DNA, 25 bp, synthetic construct
  misc_feature 1..25: note = Oligonucleotide
  source 1..25: mol_type = other DNA
ggccgggggcgccggggccggggcc

SEQ ID NO: 39453 - DNA, 25 bp, synthetic construct
  misc_feature 1..25: note = Oligonucleotide
  source 1..25: mol_type = other DNA
gtgggccgggggcgccggggccggg

SEQ ID NO: 39454 - DNA, 25 bp, synthetic construct
  misc_feature 1..25: note = Oligonucleotide
  source 1..25: mol_type = other DNA
ggcgtgggccgggggcgccggggcc

SEQ ID NO: 39455 - DNA, 25 bp, synthetic construct
  misc_feature 1..25: note = Oligonucleotide
  source 1..25: mol_type = other DNA
gtcggcgtgggccgggggcgccggg

SEQ ID NO: 39456 - DNA, 25 bp, synthetic construct
  misc_feature 1..25: note = Oligonucleotide
  source 1..25: mol_type = other DNA
agggtcggcgtgggccgggggcgcc

SEQ ID NO: 39457 - DNA, 25 bp, synthetic construct
  misc_feature 1..25: note = Oligonucleotide
  source 1..25: mol_type = other DNA
ggaagggtcggcgtgggccgggggc

SEQ ID NO: 39458 - DNA, 25 bp, synthetic construct
  misc_feature 1..25: note = Oligonucleotide
  source 1..25: mol_type = other DNA
gctggaagggtcggcgtgggccggg

SEQ ID NO: 39459 - DNA, 25 bp, synthetic construct
  misc_feature 1..25: note = Oligonucleotide
  source 1..25: mol_type = other DNA
tctgctggaagggtcggcgtgggcc

SEQ ID NO: 39460 - DNA, 25 bp, synthetic construct
  misc_feature 1..25: note = Oligonucleotide
  source 1..25: mol_type = other DNA
gcttctgctggaagggtcggcgtgg

SEQ ID NO: 39461 - DNA, 25 bp, synthetic construct
  misc_feature 1..25: note = Oligonucleotide
  source 1..25: mol_type = other DNA
gcggcttctgctggaagggtcggcg

SEQ ID NO: 39462 - DNA, 25 bp, synthetic construct
  misc_feature 1..25: note = Oligonucleotide
  source 1..25: mol_type = other DNA
gcagcggcttctgctggaagggtcg

SEQ ID NO: 39463 - DNA, 25 bp, synthetic construct
  misc_feature 1..25: note = Oligonucleotide
  source 1..25: mol_type = other DNA
gctgcagcggcttctgctggaaggg

SEQ ID NO: 39464 - DNA, 25 bp, synthetic construct
  misc_feature 1..25: note = Oligonucleotide
  source 1..25: mol_type = other DNA
agagctgcagcggcttctgctggaa

SEQ ID NO: 39465 - DNA, 25 bp, synthetic construct
  misc_feature 1..25: note = Oligonucleotide
  source 1..25: mol_type = other DNA
tccagagctgcagcggcttctgctg

SEQ ID NO: 39466 - DNA, 25 bp, synthetic construct
  misc_feature 1..25: note = Oligonucleotide
  source 1..25: mol_type = other DNA
tgctccagagctgcagcggcttctg

SEQ ID NO: 39467 - DNA, 25 bp, synthetic construct
  misc_feature 1..25: note = Oligonucleotide
  source 1..25: mol_type = other DNA
acttgctccagagctgcagcggctt

SEQ ID NO: 39468 - DNA, 25 bp, synthetic construct
  misc_feature 1..25: note = Oligonucleotide
  source 1..25: mol_type = other DNA
cgaacttgctccagagctgcagcgg

SEQ ID NO: 39469 - DNA, 25 bp, synthetic construct
  misc_feature 1..25: note = Oligonucleotide
  source 1..25: mol_type = other DNA
cgtcgaacttgctccagagctgcag

SEQ ID NO: 39470 - DNA, 25 bp, synthetic construct
  misc_feature 1..25: note = Oligonucleotide
  source 1..25: mol_type = other DNA
ccacgtcgaacttgctccagagctg

SEQ ID NO: 39471 - DNA, 25 bp, synthetic construct
  misc_feature 1..25: note = Oligonucleotide
  source 1..25: mol_type = other DNA
cgcccacgtcgaacttgctccagag

SEQ ID NO: 39472 - DNA, 25 bp, synthetic construct
  misc_feature 1..25: note = Oligonucleotide
  source 1..25: mol_type = other DNA
agtcgcccacgtcgaacttgctcca

SEQ ID NO: 39473 - DNA, 25 bp, synthetic construct
  misc_feature 1..25: note = Oligonucleotide
  source 1..25: mol_type = other DNA
gccagtcgcccacgtcgaacttgct

SEQ ID NO: 39474 - DNA, 25 bp, synthetic construct
  misc_feature 1..25: note = Oligonucleotide
  source 1..25: mol_type = other DNA
ccagccagtcgcccacgtcgaactt

SEQ ID NO: 39475 - DNA, 25 bp, synthetic construct
  misc_feature 1..25: note = Oligonucleotide
  source 1..25: mol_type = other DNA
tctccagccagtcgcccacgtcgaa

SEQ ID NO: 39476 - DNA, 25 bp, synthetic construct
  misc_feature 1..25: note = Oligonucleotide
  source 1..25: mol_type = other DNA
tgctctccagccagtcgcccacgtc

SEQ ID NO: 39477 - DNA, 25 bp, synthetic construct
  misc_feature 1..25: note = Oligonucleotide
  source 1..25: mol_type = other DNA
ggatgctctccagccagtcgcccac

SEQ ID NO: 39478 - DNA, 25 bp, synthetic construct
  misc_feature 1..25: note = Oligonucleotide
  source 1..25: mol_type = other DNA
ggtggatgctctccagccagtcgcc

SEQ ID NO: 39479 - DNA, 25 bp, synthetic construct
  misc_feature 1..25: note = Oligonucleotide
  source 1..25: mol_type = other DNA
ctaggtggatgctctccagccagtc

SEQ ID NO: 39480 - DNA, 25 bp, synthetic construct
  misc_feature 1..25: note = Oligonucleotide
  source 1..25: mol_type = other DNA
cgcctaggtggatgctctccagcca

SEQ ID NO: 39481 - DNA, 25 bp, synthetic construct
  misc_feature 1..25: note = Oligonucleotide
  source 1..25: mol_type = other DNA
gctcgcctaggtggatgctctccag

SEQ ID NO: 39482 - DNA, 25 bp, synthetic construct
  misc_feature 1..25: note = Oligonucleotide
  source 1..25: mol_type = other DNA
ggtgctcgcctaggtggatgctctc

SEQ ID NO: 39483 - DNA, 25 bp, synthetic construct
  misc_feature 1..25: note = Oligonucleotide
  source 1..25: mol_type = other DNA
cgcggtgctcgcctaggtggatgct

SEQ ID NO: 39484 - DNA, 25 bp, synthetic construct
  misc_feature 1..25: note = Oligonucleotide
  source 1..25: mol_type = other DNA
ggtcgcggtgctcgcctaggtggat

SEQ ID NO: 39485 - DNA, 25 bp, synthetic construct
  misc_feature 1..25: note = Oligonucleotide
  source 1..25: mol_type = other DNA
agcggtcgcggtgctcgcctaggtg

SEQ ID NO: 39486 - DNA, 25 bp, synthetic construct
  misc_feature 1..25: note = Oligonucleotide
  source 1..25: mol_type = other DNA
cgaagcggtcgcggtgctcgcctag

SEQ ID NO: 39487 - DNA, 25 bp, synthetic construct
  misc_feature 1..25: note = Oligonucleotide
  source 1..25: mol_type = other DNA
cctcgaagcggtcgcggtgctcgcc

SEQ ID NO: 39488 - DNA, 25 bp, synthetic construct
  misc_feature 1..25: note = Oligonucleotide
  source 1..25: mol_type = other DNA
ggtcctcgaagcggtcgcggtgctc

SEQ ID NO: 39489 - DNA, 25 bp, synthetic construct
  misc_feature 1..25: note = Oligonucleotide
  source 1..25: mol_type = other DNA
catggtcctcgaagcggtcgcggtg

SEQ ID NO: 39490 - DNA, 25 bp, synthetic construct
  misc_feature 1..25: note = Oligonucleotide
  source 1..25: mol_type = other DNA
tctcatggtcctcgaagcggtcgcg

SEQ ID NO: 39491 - DNA, 25 bp, synthetic construct
  misc_feature 1..25: note = Oligonucleotide
  source 1..25: mol_type = other DNA
ctatctcatggtcctcgaagcggtc

SEQ ID NO: 39492 - DNA, 25 bp, synthetic construct
  misc_feature 1..25: note = Oligonucleotide
  source 1..25: mol_type = other DNA
cttctatctcatggtcctcgaagcg

SEQ ID NO: 39493 - DNA, 25 bp, synthetic construct
  misc_feature 1..25: note = Oligonucleotide
  source 1..25: mol_type = other DNA
cgccttctatctcatggtcctcgaa

SEQ ID NO: 39494 - DNA, 25 bp, synthetic construct
  misc_feature 1..25: note = Oligonucleotide
  source 1..25: mol_type = other DNA
gcgcgccttctatctcatggtcctc

SEQ ID NO: 39495 - DNA, 25 bp, synthetic construct
  misc_feature 1..25: note = Oligonucleotide
  source 1..25: mol_type = other DNA
ggtgcgcgccttctatctcatggtc

SEQ ID NO: 39496 - DNA, 25 bp, synthetic construct
  misc_feature 1..25: note = Oligonucleotide
  source 1..25: mol_type = other DNA
gtaggtgcgcgccttctatctcatg

SEQ ID NO: 39497 - DNA, 25 bp, synthetic construct
  misc_feature 1..25: note = Oligonucleotide
  source 1..25: mol_type = other DNA
cgggtaggtgcgcgccttctatctc

SEQ ID NO: 39498 - DNA, 25 bp, synthetic construct
  misc_feature 1..25: note = Oligonucleotide
  source 1..25: mol_type = other DNA
gcgcgggtaggtgcgcgccttctat

SEQ ID NO: 39499 - DNA, 25 bp, synthetic construct
  misc_feature 1..25: note = Oligonucleotide
  source 1..25: mol_type = other DNA
taagcgcgggtaggtgcgcgccttc

SEQ ID NO: 39500 - DNA, 25 bp, synthetic construct
  misc_feature 1..25: note = Oligonucleotide
  source 1..25: mol_type = other DNA
tggtaagcgcgggtaggtgcgcgcc

SEQ ID NO: 39501 - DNA, 25 bp, synthetic construct
  misc_feature 1..25: note = Oligonucleotide
  source 1..25: mol_type = other DNA
ccttggtaagcgcgggtaggtgcgc

SEQ ID NO: 39502 - DNA, 25 bp, synthetic construct
  misc_feature 1..25: note = Oligonucleotide
  source 1..25: mol_type = other DNA
cgtccttggtaagcgcgggtaggtg

SEQ ID NO: 39503 - DNA, 25 bp, synthetic construct
  misc_feature 1..25: note = Oligonucleotide
  source 1..25: mol_type = other DNA
agtcgtccttggtaagcgcgggtag

SEQ ID NO: 39504 - DNA, 25 bp, synthetic construct
  misc_feature 1..25: note = Oligonucleotide
  source 1..25: mol_type = other DNA
cgaagtcgtccttggtaagcgcggg

SEQ ID NO: 39505 - DNA, 25 bp, synthetic construct
  misc_feature 1..25: note = Oligonucleotide
  source 1..25: mol_type = other DNA
ccacgaagtcgtccttggtaagcgc

SEQ ID NO: 39506 - DNA, 25 bp, synthetic construct
  misc_feature 1..25: note = Oligonucleotide
  source 1..25: mol_type = other DNA
gctccacgaagtcgtccttggtaag

SEQ ID NO: 39507 - DNA, 25 bp, synthetic construct
  misc_feature 1..25: note = Oligonucleotide
  source 1..25: mol_type = other DNA
ccagctccacgaagtcgtccttggt

SEQ ID NO: 39508 - DNA, 25 bp, synthetic construct
  misc_feature 1..25: note = Oligonucleotide
  source 1..25: mol_type = other DNA
cgcccagctccacgaagtcgtcctt

SEQ ID NO: 39509 - DNA, 25 bp, synthetic construct
  misc_feature 1..25: note = Oligonucleotide
  source 1..25: mol_type = other DNA
tgacgcccagctccacgaagtcgtc

SEQ ID NO: 39510 - DNA, 25 bp, synthetic construct
  misc_feature 1..25: note = Oligonucleotide
  source 1..25: mol_type = other DNA
gcgtgacgcccagctccacgaagtc

SEQ ID NO: 39511 - DNA, 25 bp, synthetic construct
  misc_feature 1..25: note = Oligonucleotide
  source 1..25: mol_type = other DNA
cgcgcgtgacgcccagctccacgaa

SEQ ID NO: 39512 - DNA, 25 bp, synthetic construct
  misc_feature 1..25: note = Oligonucleotide
  source 1..25: mol_type = other DNA
ccacgcgcgtgacgcccagctccac

SEQ ID NO: 39513 - DNA, 25 bp, synthetic construct
  misc_feature 1..25: note = Oligonucleotide
  source 1..25: mol_type = other DNA
ggcccacgcgcgtgacgcccagctc

SEQ ID NO: 39514 - DNA, 25 bp, synthetic construct
  misc_feature 1..25: note = Oligonucleotide
  source 1..25: mol_type = other DNA
ggtggcccacgcgcgtgacgcccag

SEQ ID NO: 39515 - DNA, 25 bp, synthetic construct
  misc_feature 1..25: note = Oligonucleotide
  source 1..25: mol_type = other DNA
tgcggtggcccacgcgcgtgacgcc

SEQ ID NO: 39516 - DNA, 25 bp, synthetic construct
  misc_feature 1..25: note = Oligonucleotide
  source 1..25: mol_type = other DNA
tcatgcggtggcccacgcgcgtgac

SEQ ID NO: 39517 - DNA, 25 bp, synthetic construct
  misc_feature 1..25: note = Oligonucleotide
  source 1..25: mol_type = other DNA
tgttcatgcggtggcccacgcgcgt

SEQ ID NO: 39518 - DNA, 25 bp, synthetic construct
  misc_feature 1..25: note = Oligonucleotide
  source 1..25: mol_type = other DNA
cgatgttcatgcggtggcccacgcg

SEQ ID NO: 39519 - DNA, 25 bp, synthetic construct
  misc_feature 1..25: note = Oligonucleotide
  source 1..25: mol_type = other DNA
gctcgatgttcatgcggtggcccac

SEQ ID NO: 39520 - DNA, 25 bp, synthetic construct
  misc_feature 1..25: note = Oligonucleotide
  source 1..25: mol_type = other DNA
cgcgctcgatgttcatgcggtggcc

SEQ ID NO: 39521 - DNA, 25 bp, synthetic construct
  misc_feature 1..25: note = Oligonucleotide
  source 1..25: mol_type = other DNA
gcgcgcgctcgatgttcatgcggtg

SEQ ID NO: 39522 - DNA, 25 bp, synthetic construct
  misc_feature 1..25: note = Oligonucleotide
  source 1..25: mol_type = other DNA
tgagcgcgcgctcgatgttcatgcg

SEQ ID NO: 39523 - DNA, 25 bp, synthetic construct
  misc_feature 1..25: note = Oligonucleotide
  source 1..25: mol_type = other DNA
gcctgagcgcgcgctcgatgttcat

SEQ ID NO: 39524 - DNA, 25 bp, synthetic construct
  misc_feature 1..25: note = Oligonucleotide
  source 1..25: mol_type = other DNA
gctgcctgagcgcgcgctcgatgtt

SEQ ID NO: 39525 - DNA, 25 bp, synthetic construct
  misc_feature 1..25: note = Oligonucleotide
  source 1..25: mol_type = other DNA
ccagctgcctgagcgcgcgctcgat

SEQ ID NO: 39526 - DNA, 25 bp, synthetic construct
  misc_feature 1..25: note = Oligonucleotide
  source 1..25: mol_type = other DNA
cgtccagctgcctgagcgcgcgctc

SEQ ID NO: 39527 - DNA, 25 bp, synthetic construct
  misc_feature 1..25: note = Oligonucleotide
  source 1..25: mol_type = other DNA
tgccgtccagctgcctgagcgcgcg

SEQ ID NO: 39528 - DNA, 25 bp, synthetic construct
  misc_feature 1..25: note = Oligonucleotide
  source 1..25: mol_type = other DNA
agctgccgtccagctgcctgagcgc

SEQ ID NO: 39529 - DNA, 25 bp, synthetic construct
  misc_feature 1..25: note = Oligonucleotide
  source 1..25: mol_type = other DNA
gtcagctgccgtccagctgcctgag

SEQ ID NO: 39530 - DNA, 25 bp, synthetic construct
  misc_feature 1..25: note = Oligonucleotide
  source 1..25: mol_type = other DNA
ggcgtcagctgccgtccagctgcct

SEQ ID NO: 39531 - DNA, 25 bp, synthetic construct
  misc_feature 1..25: note = Oligonucleotide
  source 1..25: mol_type = other DNA
tggggcgtcagctgccgtccagctg

SEQ ID NO: 39532 - DNA, 25 bp, synthetic construct
  misc_feature 1..25: note = Oligonucleotide
  source 1..25: mol_type = other DNA
gggtggggcgtcagctgccgtccag

SEQ ID NO: 39533 - DNA, 25 bp, synthetic construct
  misc_feature 1..25: note = Oligonucleotide
  source 1..25: mol_type = other DNA
tgggggtggggcgtcagctgccgtc

SEQ ID NO: 39534 - DNA, 25 bp, synthetic construct
  misc_feature 1..25: note = Oligonucleotide
  source 1..25: mol_type = other DNA
gagtgggggtggggcgtcagctgcc

SEQ ID NO: 39535 - DNA, 25 bp, synthetic construct
  misc_feature 1..25: note = Oligonucleotide
  source 1..25: mol_type = other DNA
cgggagtgggggtggggcgtcagct

SEQ ID NO: 39536 - DNA, 25 bp, synthetic construct
  misc_feature 1..25: note = Oligonucleotide
  source 1..25: mol_type = other DNA
gggcgggagtgggggtggggcgtca

SEQ ID NO: 39537 - protein, 22 aa, synthetic construct
  REGION 1..22: note = Peptide
RRSRTARAGRPGRNSSRPSAPR
